(19) United States
(12) Patent Application Publication
(10) Pub. No.: US 2024/0067729 A1
(43) Pub. Date: Feb. 29, 2024

(54) ANTI-PD-L1 ANTIBODIES AND FUSION PROTEINS THEREOF

(71) Applicant: Palleon Pharmaceuticals Inc., Waltham, MA (US)

(72) Inventors: Li Peng, Lexington, MA (US); Jenny Che, Ashland, MA (US); Lihui Xu, Chestnut Hill, MA (US)

(21) Appl. No.: 18/260,364

(22) PCT Filed: Jan. 6, 2022
(86) PCT No.: PCT/US2022/011504

§ 371 Date: Jul. 5, 2023

Related U.S. Application Data
(60) Provisional application No. 63/134,412, filed on Jan. 6, 2021.

(51) Int. Cl. C07K 16/28; A61P 35/00; C12N 9/24

(52) U.S. Cl. CPC C07K 16/2827; A61P 35/00; C12N 9/2402; C12Y 302/01018; A61K 2039/505; C07K 2317/24; C07K 2317/622; C07K 2317/76; C07K 2317/77; C07K 2317/92; C07K 2319/33

(57) ABSTRACT

The invention relates generally to anti-PD-L1 antibodies, and recombinant sialidase and anti-PD-L1 immunoglobulin antigen-binding domain fusion proteins. The invention also provides antibody conjugates including a sialidase and an anti-PD-L1 antibody or a portion thereof. The invention further relates to methods of using the antibodies, sialidase fusion proteins, or antibody conjugates for treating cancer.

### CROSS-REFERENCE TO RELATED APPLICATIONS

[0001] This application claims the benefit of and priority to U.S. Provisional Patent Application No. 63/134,412, filed Jan. 6, 2021, the disclosure of which is incorporated herein by reference in its entirety for all purposes.

### FIELD OF THE INVENTION

[0002] The invention relates generally to antibodies, recombinant sialidase fusion proteins, and antibody conjugates, and their use in the treatment of cancer.

### BACKGROUND

[0003] Programmed death-ligand 1 (PD-L1) also known as cluster of differentiation 274 (CD274) or B7 homolog 1 (B7-H1) is a protein that in humans is encoded by the CD274 gene. Upregulation of PD-L1 may allow certain cancers to evade the host immune system. An analysis of 196 tumor specimens from patients with renal cell carcinoma found that high tumor expression of PD-L1 was associated with increased tumor aggressiveness and a 4.5-fold increased risk of death (Thompson et al. (2004) PROC. NATL. ACAD. SCI. USA 101(49) 17174-17179). PD-L1 expression is detected in many human cancers, including bladder, breast, cervical, esophageal, gastric, kidney, lung, ovary and pancreatic cancer (Wang et al. (2016) ONCO. TARGETS THER. 9:5023-5039). For certain cancers, expression of PD-L1 is associated with reduced numbers of tumor infiltrating lymphocytes and poor prognosis (Ohaegbulam et al. (2015) TRENDS MOL. MED. 21(1): 24-33). A number of anti-PD-L1 antibodies have already been approved in the United States for treating a variety of cancers. For example, atezolizumab has been approved for use in, for example, urothelial carcinomas, non-small cell lung cancers (NSCLC), triple-negative breast cancers, and small cell lung cancers, durvalumab has been approved for use in, for example, urothelial carcinomas, and NSCLCs, and avelumab has been approved for use in Merkel cell carcinomas, urothelial carcinomas, and renal cell carcinomas. Other PD-L1 antibodies are in still in development as immuno-oncology therapies and are showing good results in clinical trials including for treating NSCLC and melanoma (Akinleye et al. (2019) J. HEMATOL. ONCOL. 12(1):92).

[0004] A growing body of evidence supports roles for glycans, and sialoglycans in particular, at various pathophysiological steps of tumor progression. Glycans regulate tumor proliferation, invasion, hematogenous metastasis and angiogenesis (Fuster et al. (2005) NAT. REV. CANCER 5(7): 526-42). The sialylation of cell surface glycoconjugates is frequently altered in cancers, resulting in the expression of sialylated tumor-associated carbohydrate antigens. The expression of sialylated glycans by tumor cells is often associated with increased aggressiveness and metastatic potential of a tumor (Julien S., Delannoy P. (2015) “Sialic Acid and Cancer”, In: Taniguchi N., Endo T., Hart G., Seeberger P., Wong C H. (eds) Glycoscience: Biology and Medicine. Springer, Tokyo. https://doi.org/10.1007/978-4-431-54841-6_193).

[0005] It has recently become apparent that Siglecs (sialic acid-binding immunoglobulin-like lectins), a family of sialic acid binding lectins, play a role in cancer immune suppression by binding to hypersialylated cancer cells and mediating the suppression of signals from activating NK cell receptors, thereby inhibiting NK cell-mediated killing of tumor cells (Jandus et al. (2014) J. CLIN. INVEST. 124: 1810-1820; Laubli et al. (2014) PROC. NATL. ACAD. SCI. USA 111: 14211-14216; Hudak et al. (2014) NAT. CHEM. BIOL. 10: 69-75). Likewise, enzymatic removal of sialic acids by treatment with sialidase can enhance NK cell-mediated killing of tumor cells (Jandus, supra; Hudak, supra; Xiao et al. (2016) PROC. NATL. ACAD. SCI. USA 113(37): 10304-9).

[0006] Cancer immunotherapy with immune checkpoint inhibitors, including antibodies that block the PD-1/PD-L1 pathway, has improved the outcome of many cancer patients. However, despite advances that have been made to date, many patients do not respond to currently available immune checkpoint inhibitors. Accordingly, there is still a need for effective interventions that overcome the immune suppressive tumor microenvironment and for treating cancers associated with hypersialylated cancer cells.

### SUMMARY OF THE INVENTION

[0007] The invention is based, in part, upon the discovery of anti-PD-L1 antibodies that impact or otherwise down regulate signaling mediated by PD-1 or PD-L1. In the appropriate circumstances, the antibodies can remove the PD-1 or PD-L1-mediated repression of a subject's immune system to mediate the removal of non-natural cells, for example, cancerous cells.

[0008] The invention is also based, in part, upon the discovery that it is possible to produce fusion proteins containing a sialidase enzyme and an anti-PD-L1 immunoglobulin or a portion thereof, e.g., an antigen-binding domain and/or an immunoglobulin Fc domain, and/or antibody conjugates including a sialidase enzyme and an anti-PD-L1 antibody or a portion thereof, e.g., an antigen-binding domain and/or an immunoglobulin Fc domain. The sialidase enzyme portion of the fusion protein and/or antibody conjugate may comprise at least one mutation relative to a wild-type sialidase. The mutations, or combination of mutations, can improve the expression, activity or both the expression and activity of the sialidase to improve its use in cancer diagnosis and/or treatment.

[0009] The fusion proteins and/or antibody conjugates have suitable substrate specificities and activities to be useful in removing sialic acid and/or sialic acid containing molecules from the surface of cancer cells, e.g., PD-L1-expressing cancer cells, and/or removing sialic acid and/or sialic acid containing molecules from the tumor microenvironment, and/or reducing the concentration of sialic acid and/or sialic acid containing molecules in the tumor microenvironment.

[0010] Accordingly, in one aspect, the invention provides an isolated antibody that binds human PD-L1.

[0011] In certain embodiments, the antibody comprises an immunoglobulin heavy chain variable region comprising a CDRH1 comprising the amino acid sequence of SEQ ID NO: 161, a CDRH2 comprising the amino acid sequence of SEQ ID NO: 162, and a CDRH3 comprising the amino acid sequence of SEQ ID NO: 163 (PAL769-VH, h769-VH); and/or an immunoglobulin light chain variable region comprising a CDRL1 comprising the amino acid sequence of SEQ ID NO: 165, a CDRL2 comprising the amino acid sequence of SEQ ID NO: 142, and a CDRL3 comprising the amino acid sequence of SEQ ID NO: 166 (PAL769-VL, h769-IF3-VL, h769-tm2-VL, h769-tm3-VL).

[0012] In certain embodiments, the antibody comprises an immunoglobulin heavy chain variable region comprising a CDRH1 comprising the amino acid sequence of SEQ ID NO: 250, a CDRH2 comprising the amino acid sequence of SEQ ID NO: 251, and a CDRH3 comprising the amino acid sequence of SEQ ID NO: 163 (PAL769-VH); and/or an immunoglobulin light chain variable region comprising a CDRL1 comprising the amino acid sequence of SEQ ID NO: 253, a CDRL2 comprising the amino acid sequence of SEQ ID NO: 254, and a CDRL3 comprising the amino acid sequence of SEQ ID NO: 166 (PAL769-VL).

[0013] In certain embodiments, the antibody comprises an immunoglobulin heavy chain variable region comprising a CDRH1 comprising the amino acid sequence of SEQ ID NO: 250, a CDRH2 comprising the amino acid sequence of SEQ ID NO: 252, and a CDRH3 comprising the amino acid sequence of SEQ ID NO: 163 (h769-VH); and/or an immunoglobulin light chain variable region comprising a CDRL1 comprising the amino acid sequence of SEQ ID NO: 255, a CDRL2 comprising the amino acid sequence of SEQ ID NO: 254, and a CDRL3 comprising the amino acid sequence of SEQ ID NO: 166 (h769-IF3-VL, h769-tm2-VL, h769-tm3-VL).

[0014] In certain embodiments, the antibody comprises an immunoglobulin heavy chain variable region comprising a CDR_{H1} comprising the amino acid sequence of SEQ ID NO: 161, a CDRH2 comprising the amino acid sequence of SEQ ID NO: 162, and a CDRH3 comprising the amino acid sequence of SEQ ID NO: 163 (PAL769-VH, h769-VH); and/or an immunoglobulin light chain variable region comprising a CDR_{L1} comprising the amino acid sequence of SEQ ID NO: 165, a CDR_{L2} comprising the amino acid sequence of SEQ ID NO: 142, and a CDR_{L3} comprising the amino acid sequence of SEQ ID NO: 203 (h769.T-VL).

[0015] In certain embodiments, the antibody comprises an immunoglobulin heavy chain variable region comprising a CDRH1 comprising the amino acid sequence of SEQ ID NO: 250, a CDRH2 comprising the amino acid sequence of SEQ ID NO: 252, and a CDRH3 comprising the amino acid sequence of SEQ ID NO: 163 (h769-VH); and/or an immunoglobulin light chain variable region comprising a CDRL1 comprising the amino acid sequence of SEQ ID NO: 255, a CDRL2 comprising the amino acid sequence of SEQ ID NO: 254, and a CDRL3 comprising the amino acid sequence of SEQ ID NO: 203 (h769.T-VL).

[0016] In certain embodiments, the antibody comprises an immunoglobulin heavy chain variable region comprising a CDRH1 comprising the amino acid sequence of SEQ ID NO: 129, a CDRH2 comprising the amino acid sequence of SEQ ID NO: 130, and a CDRH3 comprising the amino acid sequence of SEQ ID NO: 131 (PAL752-VH); and/or an immunoglobulin light chain variable region comprising a CDRL1 comprising the amino acid sequence of SEQ ID NO: 133, a CDRL2 comprising the amino acid sequence of SEQ ID NO: 134, and a CDRL3 comprising the amino acid sequence of SEQ ID NO: 135 (PAL752-VL).

[0017] In certain embodiments, the antibody comprises an immunoglobulin heavy chain variable region comprising a CDRH1 comprising the amino acid sequence of SEQ ID NO: 137, a CDRH2 comprising the amino acid sequence of SEQ ID NO: 138, and a CDRH3 comprising the amino acid sequence of SEQ ID NO: 139 (PAL759-VH); and/or an immunoglobulin light chain variable region comprising a CDRL1 comprising the amino acid sequence of SEQ ID NO: 141, a CDRL2 comprising the amino acid sequence of SEQ ID NO: 142, and a CDRL3 comprising the amino acid sequence of SEQ ID NO: 143 (PAL759-VL).

[0018] In certain embodiments, the antibody comprises an immunoglobulin heavy chain variable region comprising a CDRH1 comprising the amino acid sequence of SEQ ID NO: 145, a CDRH2 comprising the amino acid sequence of SEQ ID NO: 146, and a CDRH3 comprising the amino acid sequence of SEQ ID NO: 147 (PAL760-VH); and/or an immunoglobulin light chain variable region comprising a CDRL1 comprising the amino acid sequence of SEQ ID NO: 149, a CDRL2 comprising the amino acid sequence of SEQ ID NO: 150, and a CDRL3 comprising the amino acid sequence of SEQ ID NO: 151 (PAL760-VL).

[0019] In certain embodiments, the antibody comprises an immunoglobulin heavy chain variable region comprising a CDRH1 comprising the amino acid sequence of SEQ ID NO: 153, a CDRH2 comprising the amino acid sequence of SEQ ID NO: 154, and a CDRH3 comprising the amino acid sequence of SEQ ID NO: 155 (PAL767-VH); and/or an immunoglobulin light chain variable region comprising a CDRL1 comprising the amino acid sequence of SEQ ID NO: 157, a CDRL2 comprising the amino acid sequence of SEQ ID NO: 158, and a CDRL3 comprising the amino acid sequence of SEQ ID NO: 159 (PAL767-VL).

[0020] In certain embodiments, the antibody comprises an immunoglobulin heavy chain variable region comprising a CDRH1 comprising the amino acid sequence of SEQ ID NO: 161, a CDRH2 comprising the amino acid sequence of SEQ ID NO: 168, and a CDRH3 comprising the amino acid sequence of SEQ ID NO: 169 (PAL771-VH); and/or an immunoglobulin light chain variable region comprising a CDRL1 comprising the amino acid sequence of SEQ ID NO: 171, a CDRL2 comprising the amino acid sequence of SEQ ID NO: 172, and a CDRL3 comprising the amino acid sequence of SEQ ID NO: 173 (PAL771-VL).

[0021] In certain embodiments, the antibody comprises an immunoglobulin heavy chain variable region comprising a CDRH1 comprising the amino acid sequence of SEQ ID NO: 175, a CDRH2 comprising the amino acid sequence of SEQ ID NO: 176, and a CDRH3 comprising the amino acid sequence of SEQ ID NO: 177 (PAL785-VH); and/or an immunoglobulin light chain variable region comprising a CDRL1 comprising the amino acid sequence of SEQ ID NO: 179, a CDRL2 comprising the amino acid sequence of SEQ ID NO: 180, and a CDRL3 comprising the amino acid sequence of SEQ ID NO: 181 (PAL785-VL).

[0022] In certain embodiments, the antibody comprises an immunoglobulin heavy chain variable region comprising a CDRH1 comprising the amino acid sequence of SEQ ID NO: 183, a CDRH2 comprising the amino acid sequence of SEQ ID NO: 184, and a CDRH3 comprising the amino acid sequence of SEQ ID NO: 185 (PAL787-VH); and/or an immunoglobulin light chain variable region comprising a CDRL1 comprising the amino acid sequence of SEQ ID NO: 187, a CDRL2 comprising the amino acid sequence of SEQ ID NO: 188, and a CDRL3 comprising the amino acid sequence of SEQ ID NO: 189 (PAL787-VL).

[0023] In certain embodiments, the antibody comprises an immunoglobulin heavy chain variable region comprising a CDRH1 comprising the amino acid sequence of SEQ ID NO: 191, a CDRH2 comprising the amino acid sequence of SEQ ID NO: 192, and a CDRH3 comprising the amino acid sequence of SEQ ID NO: 193 (PAL788-VH); and/or an immunoglobulin light chain variable region comprising a CDRL1 comprising the amino acid sequence of SEQ ID NO: 195, a CDRL2 comprising the amino acid sequence of SEQ ID NO: 196, and a CDRL3 comprising the amino acid sequence of SEQ ID NO: 197 (PAL788-VL).

[0024] In certain embodiments of any of the foregoing antibodies, the CDRs are interposed between human or humanized immunoglobulin framework regions.

[0025] In certain embodiments, the antibody comprises an immunoglobulin heavy chain variable region comprising the amino acid sequence of SEQ ID NO: 164 (PAL769-VH), and an immunoglobulin light chain variable region comprising the amino acid sequence of SEQ ID NO: 167 (PAL769-VL).

[0026] In certain embodiments, the antibody comprises an immunoglobulin heavy chain variable region comprising the amino acid sequence of SEQ ID NO: 199 (h769-VH), and/or an immunoglobulin light chain variable region comprising the amino acid sequence of SEQ ID NO: 200 (h769-IF3-VL).

[0027] In certain embodiments, the antibody comprises an immunoglobulin heavy chain variable region comprising the amino acid sequence of SEQ ID NO: 199 (h769-VH), and/or an immunoglobulin light chain variable region comprising the amino acid sequence of SEQ ID NO: 201 (h769-tm2-VL).

[0028] In certain embodiments, the antibody comprises an immunoglobulin heavy chain variable region comprising the amino acid sequence of SEQ ID NO: 199 (h769-VH), and/or an immunoglobulin light chain variable region comprising the amino acid sequence of SEQ ID NO: 202 (h769-tm3-VL).

[0029] In certain embodiments, the antibody comprises an immunoglobulin heavy chain variable region comprising the amino acid sequence of SEQ ID NO: 199 (h769-VH), and/or an immunoglobulin light chain variable region comprising the amino acid sequence of SEQ ID NO: 204 (h769.T-VL).

[0030] In certain embodiments, the antibody comprises an immunoglobulin heavy chain variable region comprising the amino acid sequence of SEQ ID NO: 132 (PAL752-VH), and/or an immunoglobulin light chain variable region comprising the amino acid sequence of SEQ ID NO: 136 (PAL752-VL).

[0031] In certain embodiments, the antibody comprises an immunoglobulin heavy chain variable region comprising the amino acid sequence of SEQ ID NO: 140 (PAL759-VH), and/or an immunoglobulin light chain variable region comprising the amino acid sequence of SEQ ID NO: 144 (PAL759-VL).

[0032] In certain embodiments, the antibody comprises an immunoglobulin heavy chain variable region comprising the amino acid sequence of SEQ ID NO: 148 (PAL760-VH), and/or an immunoglobulin light chain variable region comprising the amino acid sequence of SEQ ID NO: 152 (PAL760-VL).

[0033] In certain embodiments, the antibody comprises an immunoglobulin heavy chain variable region comprising the amino acid sequence of SEQ ID NO: 156 (PAL767-VH), and/or an immunoglobulin light chain variable region comprising the amino acid sequence of SEQ ID NO: 160 (PAL767-VL).

[0034] In certain embodiments, the antibody comprises an immunoglobulin heavy chain variable region comprising the amino acid sequence of SEQ ID NO: 170 (PAL771-VH), and/or an immunoglobulin light chain variable region comprising the amino acid sequence of SEQ ID NO: 174 (PAL771-VL).

[0035] In certain embodiments, the antibody comprises an immunoglobulin heavy chain variable region comprising the amino acid sequence of SEQ ID NO: 178 (PAL785-VH), and/or an immunoglobulin light chain variable region comprising the amino acid sequence of SEQ ID NO: 182 (PAL785-VL).

[0036] In certain embodiments, the antibody comprises an immunoglobulin heavy chain variable region comprising the amino acid sequence of SEQ ID NO: 186 (PAL787-VH), and/or an immunoglobulin light chain variable region comprising the amino acid sequence of SEQ ID NO: 190 (PAL787-VL).

[0037] In certain embodiments, the antibody comprises an immunoglobulin heavy chain variable region comprising the amino acid sequence of SEQ ID NO: 194 (PAL788-VH), and/or an immunoglobulin light chain variable region comprising the amino acid sequence of SEQ ID NO: 198 (PAL788-VL).

[0038] In certain embodiments of any of the foregoing antibodies, the antibody further comprises a heavy chain constant region (e.g., an IgG1, IgG2, IgG3, and IgG4 heavy chain constant region) and/or light chain constant region.

[0039] In certain embodiments of any of the foregoing antibodies, the antibody binds to human PD-L1 with a KD of 5 nM or lower, 3 nM or lower, 2.5 nM or lower, 2 nM or lower, 1 nM or lower, 0.75 nM or lower, 0.5 nM or lower, 0.1 nM, 0.075 nM, or 0.05 nM or lower, as measured by surface plasmon resonance or bio-layer interferometry. In certain embodiments, the antibody also binds to Macaca fascicularis (cynomolgus) PD-L1.

[0040] In another aspect, the invention provides an isolated antibody that competes with any of the foregoing antibodies for binding to human PD-L1 and/or binds to the same epitope on human PD-L1 as any of the foregoing antibodies.

[0041] In another aspect, the invention provides an isolated nucleic acid comprising a nucleotide sequence encoding an immunoglobulin heavy chain variable region of any of the foregoing antibodies and/or an immunoglobulin light chain variable region of any of the foregoing antibodies.

[0042] In another aspect, the invention provides an expression vector comprising: (i) a nucleic acid comprising a nucleotide sequence encoding an immunoglobulin heavy chain variable region of any of the foregoing antibodies; and/or (ii) a nucleic acid comprising a nucleotide sequence encoding an immunoglobulin light chain variable region of any of the foregoing antibodies.

[0043] In another aspect, the invention provides a host cell comprising any of the foregoing nucleic acids or expression vectors.

[0044] In another aspect, the invention provides a fusion protein comprising (or consisting essentially of): (a) sialidase enzyme; and (b) an anti-PD-L1 immunoglobulin antigen-binding domain derived from any of the foregoing antibodies.

[0045] In certain embodiments, the sialidase is a human sialidase, e.g., a recombinant mutant human sialidase. In certain embodiments, the sialidase comprises: (a) a substitution or deletion of a methionine residue at a position corresponding to position 1 of wild-type human Neu2 (M1); (b) a substitution of a valine residue at a position corresponding to position 6 of wild-type human Neu2 (V6); (c) a substitution of a lysine residue at a position corresponding to position 9 of wild-type human Neu2 (K9); (d) a substitution of an alanine residue at a position corresponding to position 42 of wild-type human Neu2 (A42); (e) a substitution of a proline residue at a position corresponding to position 62 of wild-type human Neu2 (P62); (f) a substitution of an alanine residue at a position corresponding to position 93 of wild-type human Neu2 (A93); (g) a substitution of a glutamine residue at a position corresponding to position 126 of wild-type human Neu2 (Q126); (h) a substitution of an isoleucine residue at a position corresponding to position 187 of wild-type human Neu2 (I187); (i) a substitution of an alanine residue at a position corresponding to position 242 of wild-type human Neu2 (A242); (j) a substitution of a glutamine residue at a position corresponding to position 270 of wild-type human Neu2 (Q270); (k) a substitution of a serine residue at a position corresponding to position 301 of wild-type human Neu2 (S301); (l) a substitution of a tryptophan residue at a position corresponding to position 302 of wild-type human Neu2 (W302); (m) a substitution of a cysteine residue at a position corresponding to position 332 of wild-type human Neu2 (C332); (n) a substitution of a valine residue at a position corresponding to position 363 of wild-type human Neu2 (V363); or (o) a substitution of a leucine residue at a position corresponding to position 365 of wild-type human Neu2 (L365); or a combination of any of the foregoing substitutions.

[0046] In certain embodiments, in the sialidase: (a) the methionine residue at a position corresponding to position 1 of wild-type human Neu2 is deleted (AMI), is substituted by alanine (MIA), or is substituted by aspartic acid (MID); (b) the valine residue at a position corresponding to position 6 of wild-type human Neu2 is substituted by tyrosine (V6Y); (c) the lysine residue at a position corresponding to position 9 of wild-type human Neu2 is substituted by aspartic acid (K9D); (d) the alanine residue at a position corresponding to position 42 of wild-type human Neu2 is substituted by arginine (A42R) or aspartic acid (A42D); (e) the proline residue at a position corresponding to position 62 of wild-type human Neu2 is substituted by asparagine (P62N), aspartic acid (P62D), histidine (P62H), glutamic acid (P62E), glycine (P62G), serine (P62S), or threonine (P62T); (f) the alanine residue at a position corresponding to position 93 of wild-type human Neu2 is substituted by glutamic acid (A93E) or lysine (A93K); (g) the glutamine residue at a position corresponding to position 126 of wild-type human Neu2 is substituted by leucine (Q126L), glutamic acid (Q126E), phenylalanine (Q126F), histidine (Q126H), isoleucine (Q126I), or tyrosine (Q126Y); (h) the isoleucine residue at a position corresponding to position 187 of wild-type human Neu2 is substituted by lysine (I187K); (i) the alanine residue at a position corresponding to position 242 of wild-type human Neu2 is substituted by cysteine (A242C), phenylalanine (A242F), glycine (A242G), histidine (A242H), isoleucine (A242I), lysine (A242K), leucine (A242L), methionine (A242M), asparagine (A242N), glutamine (A242Q), arginine (A242R), serine (A242S), valine (A242V), tryptophan (A242W), or tyrosine (A242Y); (j) the glutamine residue at a position corresponding to position 270 of wild-type human Neu2 is substituted by alanine (Q270A), histidine (Q270H), phenylalanine (Q270F), proline (Q270P), serine (Q270S), or threonine (Q270T); (k) the serine residue at a position corresponding to position 301 of wild-type human Neu2 is substituted by alanine (S301A), aspartic acid (S301D), glutamic acid (S301E), phenylalanine (S301F), histidine (S301H), lysine (S301K), leucine (S301L), methionine (S301M), asparagine (S301N), proline (S301P), glutamine (S301Q), arginine (S301R), threonine (S301T), valine (S301V), tryptophan (S301W), or tyrosine (S301Y); (l) the tryptophan residue at a position corresponding to position 302 of wild-type human Neu2 is substituted by alanine (W302A), aspartic acid (W302D), phenylalanine (W302F), glycine (W302G), histidine (W302H), isoleucine (W3021), lysine (W302K), leucine (W302L), methionine (W302M), asparagine (W302N), proline (W302P), glutamine (W302Q), arginine (W302R), serine (W302S), threonine (W302T), valine (W302V), or tyrosine (W302Y); (m) the cysteine residue at a position corresponding to position 332 of wild-type human Neu2 is substituted by alanine (C332A); (n) the valine residue at a position corresponding to position 363 of wild-type human Neu2 is substituted by arginine (V363R); or (o) the leucine residue at a position corresponding to position 365 of wild-type human Neu2 is substituted by glutamine (L365Q), histidine (L365H), isoleucine (L365I), lysine (L365K) or serine (L365S); or the sialidase comprises a combination of any of the foregoing substitutions. For example, the sialidase may comprise a substitution selected from ΔM1, M1A, M1D, V6Y, K9D, A42R, P62G, P62N, P62S, P62T, A93E, Q126Y, I187K, A242F, A242W, A242Y, Q270A, Q270T, S301A, S301R, W302K, W302R, C332A, V363R, and L365I, or a combination of any of the foregoing substitutions.

[0047] In certain embodiments, the sialidase comprises: (a) the M1D, V6Y, P62G, A93E, I187K, and C332A substitutions; (b) the M1D, V6Y, K9D, A93E, I187K, C332A, V363R, and L365I substitutions; (c) the M1D, V6Y, P62N, I187K, and C332A substitutions; (d) the M1D, V6Y, I187K, Q270A, S301R, W302K, and C332A substitutions; (e) the M1D, V6Y, P62S, I187K, Q270A, S301R, W302K, and C332A substitutions; (f) the M1D, V6Y, P62T, I187K, Q270A, S301R, W302K, and C332A substitutions; (g) the M1D, V6Y, P62N, I187K, Q270A, S301R, W302K, and C332A substitutions; (h) the M1D, V6Y, P62G, A93E, I187K, S301A, W302R, and C332A substitutions; (i) the M1D, V6Y, P62G, A93E, Q126Y, I187K, Q270T, and C332A substitutions; (j) the M1D, V6Y, P62G, A93E, Q126Y, I187K, and C332A substitutions; (k) the M1D, V6Y, P62G, A93E, Q126Y, I187K, A242F, Q270T, and C332A substitutions; or (l) the M1D, V6Y, A42R, P62G, A93E, Q126Y, I187K, A242F, Q270T, and C332A mutations.

[0048] In certain embodiments, the sialidase is selected from Neu1, Neu2, Neu3, and Neu4, e.g., the sialidase is Neu2.

[0049] In certain embodiments, the sialidase has a different substrate specificity than the corresponding wild-type sialidase. For example, in certain embodiments the sialidase can cleave α2,3, α2,6, and/or α2,8 linkages. In certain embodiments the sialidase can cleave α2,3 and α2,8 linkages.

[0050] In certain embodiments, the sialidase comprises any one of SEQ ID NOs: 48-62, 94, 97, 100, 126, or 234, or an amino acid sequence that has at least 85%, 90%, 95%, 96%, 97%, 98%, or 99% sequence identity to any one of SEQ ID NOs: 48-62, 94, 97, 100, 126, or 234.

[0051] In certain embodiments, the sialidase comprises mutation or combination of mutations set forth in any one of Tables 1-9.

[0052] In certain embodiments, the fusion protein further comprises an immunoglobulin Fc domain. In certain embodiments, the immunoglobulin Fc domain is derived from a human IgG1, IgG2, IgG3, IgG4, IgA1, IgA2, IgD, IgE, or IgM Fc domain, e.g., the immunoglobulin Fc domain is derived from a human IgG1, IgG2, IgG3, or IgG4 Fc domain, e.g., the immunoglobulin Fc domain is derived from a human IgG1 Fc domain.

[0053] In certain embodiments, the anti-PD-L1 immunoglobulin antigen-binding domain is associated (for example, covalently or non-covalently associated) with a second anti-PD-L1 immunoglobulin antigen-binding domain to produce an anti-PD-L1 antigen-binding site. For example, in certain embodiments the anti-PD-L1 immunoglobulin antigen-binding domain is an immunoglobulin heavy chain fragment that is associated with an immunoglobulin light chain fragment to produce an anti-PD-L1 antigen-binding site. In other embodiments the anti-PD-L1 immunoglobulin antigen-binding domain is an immunoglobulin light chain fragment that is associated with an immunoglobulin heavy chain fragment to produce an anti-PD-L1 antigen-binding site.

[0054] In certain embodiments, the sialidase and the immunoglobulin Fc domain and/or the anti-PD-L1 immunoglobulin antigen-binding domain are linked by a peptide bond or an amino acid linker.

[0055] In certain embodiments, the fusion protein comprises any one of SEQ ID NOs: 205-207, 211, 213, 214, and 219.

[0056] In another aspect, the invention provides an antibody conjugate comprising any of the foregoing fusion proteins. In certain embodiments, the antibody conjugate comprises a single sialidase. In other embodiments, the antibody conjugate comprises two sialidases, which can be the same or different. In certain embodiments the antibody conjugate comprises two identical sialidases. In certain embodiments, the antibody conjugate comprises a single anti-PD-L1 antigen-binding site. In other embodiments, the antibody conjugate comprises two anti-PD-L1 antigen-binding sites, which can be the same or different. In certain embodiments, the antibody conjugate comprises two identical anti-PD-L1 antigen-binding sites.

[0057] In certain embodiments, the antibody conjugate has a molecular weight from about 135 kDa to about 165 kDa, or the antibody conjugate has a molecular weight from about 215 kDa to about 245 kDa.

[0058] In certain embodiments, the antibody conjugate comprises: (a) a first polypeptide comprising an immunoglobulin light chain; (b) a second polypeptide comprising an immunoglobulin heavy chain; and (c) a third polypeptide comprising an immunoglobulin Fc domain and a sialidase; wherein the first and second polypeptides are covalently linked together and the second and third polypeptides are covalently linked together, and wherein the first polypeptide and the second polypeptide together define an anti-PD-L1 antigen-binding site. The third polypeptide may, for example, comprise the sialidase and the immunoglobulin Fc domain in an N- to C-terminal orientation. The first polypeptide may, for example, comprise SEQ ID NO: 205, the second polypeptide may, for example, comprise any one of SEQ ID NOs: 206 or 213, and/or the third polypeptide may, for example, comprise any one of SEQ ID NOs: 207, 211, 214, or 219.

[0059] In certain embodiments, the antibody conjugate comprises: (a) a first polypeptide comprising a first immunoglobulin light chain; (b) a second polypeptide comprising a first immunoglobulin heavy chain and a first sialidase; (c) a third polypeptide comprising a second immunoglobulin heavy chain and a second sialidase; and (d) a fourth polypeptide comprising a second immunoglobulin light chain; wherein the first and second polypeptides are covalently linked together, the third and fourth polypeptides are covalently linked together, and the second and third polypeptides are covalently linked together, and wherein the first polypeptide and the second polypeptide together define a first anti-PD-L1 antigen-binding site, and the third polypeptide and the fourth polypeptide together define a second anti-PD-L1 antigen-binding site. The second and third polypeptides may, for example, comprise the first and second immunoglobulin heavy chain and the first and second sialidase, respectively, in an N- to C-terminal orientation.

[0060] In certain embodiments, the antibody conjugate comprises: (a) a first polypeptide comprising a first sialidase, a first immunoglobulin Fc domain, and a first single chain variable fragment (scFv); and (b) a second polypeptide comprising a second sialidase, a second immunoglobulin Fc domain, and an optional second single chain variable fragment (scFv); wherein the first and second polypeptides are covalently linked together, and wherein the first scFv defines a first anti-PD-L1 antigen-binding site, and the second scFv, when present, defines a second anti-PD-L1 antigen-binding site. The first polypeptide may, for example comprise the first sialidase, the first immunoglobulin Fc domain, and the first scFv in an N- to C-terminal orientation. The second polypeptide may, for example, comprise the second sialidase, the second immunoglobulin Fc domain, and the optional second scFv in an N- to C-terminal orientation.

[0061] In certain embodiments, the antibody conjugate comprises: (a) a first polypeptide comprising an immunoglobulin light chain; (b) a second polypeptide comprising an immunoglobulin heavy chain and a single chain variable fragment (scFv); and (c) a third polypeptide comprising an immunoglobulin Fc domain and a sialidase, wherein the first and second polypeptides are covalently linked together and the second and third polypeptides are covalently linked together, and wherein the immunoglobulin light chain and immunoglobulin heavy chain together define a first anti-PD-L1 antigen-binding site and the scFv defines a second anti-PD-L1 antigen-binding site. The second polypeptide may, for example comprise the immunoglobulin heavy chain and the scFv in an N- to C-terminal orientation. The third polypeptide may, for example, comprise the sialidase and the immunoglobulin Fc domain in an N- to C-terminal orientation.

[0062] In another aspect, the invention provides an isolated nucleic acid comprising a nucleotide sequence encoding at least a portion of any of the foregoing antibodies, any of the foregoing fusion proteins, or at least a portion of any of the foregoing antibody conjugates. In another aspect, the invention provides an expression vector comprising any of the foregoing nucleic acids. In another aspect, the invention provides a host cell comprising any of the foregoing expression vectors.

[0063] In another aspect, the invention provides a pharmaceutical composition comprising any of the foregoing antibodies, any of the foregoing fusion proteins, or any of the foregoing antibody conjugates.

[0064] In another aspect, the invention provides a method of treating cancer in a subject in need thereof. The method comprises administering to the subject an effective amount of any of the foregoing antibodies, any of the foregoing fusion proteins, any of the foregoing antibody conjugates, or any of the foregoing pharmaceutical compositions.

[0065] In certain embodiments, the cancer is selected from non-small cell lung cancer (NSCLC), melanoma, bladder, breast, cervical, esophageal, gastric, kidney, lung, ovary, metastatic Merkel cell carcinoma (MCC), metastatic urothelial carcinoma (UC), and pancreatic cancer.

[0066] These and other aspects and features of the invention are described in the following detailed description and claims.

### DESCRIPTION OF THE DRAWINGS

[0067] The invention can be more completely understood with reference to the following drawings.

[0068] FIG. 1 depicts an SDS-PAGE gel showing recombinant human Neu1, Neu2, Neu3, and Salmonella typhimurium (St-sialidase) under non-reducing and reducing conditions. Monomer and dimer species are indicated.

[0069] FIG. 2 is a bar graph showing the enzymatic activity of recombinant human Neu1, Neu2, and Neu3.

[0070] FIG. 3 is a line graph showing enzymatic activity as a function of substrate concentration for recombinant human Neu2 and Neu3 at the indicated pH.

[0071] FIGS. 4A-4I depict schematic representations of certain antibody conjugate constructs containing a sialidase enzyme, e.g., a human sialidase enzyme, and an anti-PD-L1 antigen binding site. For each antibody conjugate construct that contains more than one (e.g., two) sialidase, each sialidase may be the same or different. For each antibody conjugate construct that contains more than one (e.g., two) anti-PD-L1 antigen binding site, each anti-PD-L1 antigen binding site may be the same or different. For each antibody conjugate construct that contains an Fc domain, it is understood that the Fc domain can be a wild type Fc domain or can be an engineered Fc domain. For example, the Fc domain may be engineered to contain either a “knob” mutation, e.g., T366Y, or a “hole” mutation, e.g., Y407T, or both, to promote heterodimerization, or the Fc domain may be engineered to contain one or more modifications, e.g., point mutations, to provide any other modified Fc domain functionality.

[0072] FIG. 5 depicts schematic representations of certain antibody conjugate constructs containing a sialidase enzyme, e.g., a human sialidase enzyme, and an antigen binding site. For each antibody conjugate construct that contains more than one (e.g., two) antigen binding site, each antigen binding site may be the same or different. For each antibody conjugate construct that contains an Fc domain, it is understood that the Fc domain can be a wild type Fc domain or can be an engineered Fc domain. For example, the Fc domain may be engineered to contain either a “knob” mutation, e.g., T366Y, or a “hole” mutation, e.g., Y407T, or both, to promote heterodimerization, or the Fc domain may be engineered to contain one or more modifications, e.g., point mutations, to provide any other modified Fc domain functionality.

[0073] FIGS. 6A-6D are schematic representations of exemplary fusion protein conjugates referred to as a Raptor antibody sialidase conjugate (FIG. 6A), a Janus antibody sialidase conjugate (FIG. 6B), a Lobster antibody sialidase conjugate (FIG. 6C), a Bunk antibody sialidase conjugate (FIG. 6D), and a Lobster-Fab antibody sialidase conjugate (FIG. 6E).

[0074] FIG. 7 provides a graph showing the fold induction of a PD-1/PD-L1 linked NFAT driven luciferase reporter by the indicated hybridoma supernatant comprising anti-PD-L1 antibodies, showing the ability of the antibodies to functionally block the interaction between PD-L1 and PD-1. FIG. 7A, FIG. 7B, and FIG. 7C represent different hybridomas where candidate antibodies with fold inductions greater than 4 are identified.

[0075] FIGS. 8A, 8B, 8C, and 8D provide graphs showing ForteBio octet binding kinetics for human PD-L1 binding to purified hybridoma antibodies.

[0076] FIGS. 9A, 9B, 9C, and 9D provide graphs showing ForteBio octet binding kinetics for cynomolgus PD-L1 binding to purified hybridoma antibodies.

[0077] FIG. 10 provides a graph showing ELISA results indicative of the ability of purified hybridoma antibodies to block human PD-1-Fc binding to human PD-L1. The IC₅₀ (nM) for each antibody is shown.

[0078] FIG. 11 provides a graph showing ForteBio octet binding kinetics for human PD-L1 (FIG. 11A and FIG. 11B) and cynomolgus PD-L1 (FIG. 11C and FIG. 11D) binding to chimeric IgG antibodies.

[0079] FIG. 12 provides a graph showing ELISA results indicative of the ability of anti-hPD-L1 chimeric IgGs to block PD-1/PD-L1 interaction. The IC₅₀ (nM) for each antibody is shown.

[0080] FIG. 13 provides size exclusion chromatography (SEC) profiles of selected chimeric IgGs. Monomeric percentage of each chimeric antibody is shown.

[0081] FIG. 14 is a graph showing binding of chimeric PD-L1 antibodies to HCC827 (FIG. 14A) and NCI-H292 (FIG. 14B) lung epithelial cell lines. Binding was measured using a FACS analysis with a fluorescein-labeled secondary antibody. MFI=mean fluorescence intensity. The apparent Kd (nM) for each antibody is shown.

[0082] FIG. 15 is a graph depicting the level of binding and internalization of chimeric PD-L1 antibodies on human Monocyte-derived Dendritic Cells (moDC). Cells were incubated with the indicated antibodies at 1 nM, 10 nM and 10 nM antibody in the presence or absence (no-stim) of PAM3K.

[0083] FIG. 16 depicts the ability of chimeric PD-L1 antibodies to functionally block the interaction between PD-L1 and PD-1 using the PD-L1/PD-1 bioassay. Fold induction was calculated by dividing the RLU of induced cells minus background by the RLU of the no antibody control minus background. Apparent Kd (nM) for each antibody is indicated.

[0084] FIG. 17 depicts the specificity of binding of chimeric PD-L1 antibodies to CHO cells expressing PD-L1 (CHO-PD-L1, staining at 10 nM) vs parental CHO cells (staining at 100 nM).

[0085] FIGS. 18A-D are graphs depicting the enhancement of T cell proliferation and cytokine response to allogeneic moDC in the presence of the indicated PD-L1 antibodies compared to isotype control (001-1). Levels of CD4 T cell proliferation (FIG. 18A), CD8 T cell proliferation (FIG. 18B), TNFα (FIG. 18C) and IFN-γ levels (FIG. 18D) are depicted.

[0086] FIG. 19 is a graph depicting the enhancement of cytokine response in T cells to allogeneic moDC in the presence of indicated PD-L1 antibodies compared to isotype control (001-1). Levels of IL-2 (FIG. 19A), IL-4 (FIG. 19B), IL-6 (FIG. 19C) and IL-10 (FIG. 19D) are depicted.

[0087] FIG. 20 is a graph depicting the enhancement of degranulation in moDC-T cell mixed lymphocyte reactions (MLR) in the presence of the indicated PD-L1 antibodies compared to isotype control (001-1). Levels of soluble Fas Ligand (FIG. 20A), Granzyme A (FIG. 20B), perforin (FIG. 20C) and granulysin (FIG. 20D) are depicted.

[0088] FIG. 21A depicts an alignment between murine 769VH-wt (SEQ ID NO: 164) and humanized h769VH-mF0 (SEQ ID NO: 199). FIG. 21B depicts an alignment between murine 769Vk-wt (SEQ ID NO: 167) and humanized h769Vk-mF0 (SEQ ID NO: 242), h769Vk-T53I (SEQ ID NO: 243), h769Vk-A55F (SEQ ID NO: 244), h769Vk-S67Y (SEQ ID NO: 245), and h769Vk-Y87F (SEQ ID NO: 246). FIG. 21C depicts an alignment between humanized h769Vk-IY (SEQ ID NO: 247), h769Vk-IF2 (SEQ ID NO: 248), h769Vk-tm1 (SEQ ID NO: 249), h769Vk-IF3 (SEQ ID NO: 200), h769Vk-tm2 (SEQ ID NO: 201), and h769Vk-tm3 (SEQ ID NO: 202). Framework regions are shown in grey. Vkappa back mutations that were made as part of the humanization are shown in boxes.

[0089] FIG. 22 depicts SEC profiles of selected 769-hIgG1 humanized variants.

[0090] FIG. 23 provides graphs showing ForteBio octet binding kinetics of human PD-L1 (FIG. 23A) and cynomolgus PD-L1 (FIG. 23B) to selected 769-hIgG1 humanized variants.

[0091] FIG. 24 provides a graph showing the ability of humanized PD-L1 antibodies to block PD-1/PD-L1 interaction. The IC₅₀ (nM) for each antibody is shown.

[0092] FIG. 25 provides a graph showing ForteBio octet binding kinetics of selected 769-hIgG1 humanized variants to human PD-L1.

[0093] FIG. 26 depicts SEC profiles of selected 769-hIgG1 humanized variants.

[0094] FIG. 27 provides graphs depicting the ability of selected 769-hIgG1 humanized variants to enhance T cell response to allogeneic moDC. Levels of CD4 T cell proliferation (FIG. 27A), Granzyme B (FIG. 27B), and IFN-γ (FIG. 27C) as well as CD8 T cell proliferation (FIG. 27D), Granzyme A (FIG. 27E) and TNFα levels (FIG. 27F) are shown.

[0095] FIG. 28 provides graphs depicting the levels of the indicated cytokines released in response to selected 769-hIgG1 humanized variants, suggesting that the 769-hIgG1 humanized variants are capable of enhancing T cell response to allogeneic moDC. Perforin (FIG. 28A), soluble Fas (FIG. 28B), IL-6 (FIG. 28C), Granulysin (FIG. 28D), soluble Fas Ligand (FIG. 28E) and IL-10 levels (FIG. 28F) are shown.

[0096] FIG. 29 provides graphs depicting the levels of the indicated cytokines released from peripheral blood mononuclear cells (PBMCs) in response to the cytomegalovirus pp65 peptide mix (“CMV pp65”) and in the presence of selected 769-hIgG1 humanized variants. “No stim”=unstimulated control (i.e., cells not exposed to CMV pp65). Levels of IL-2 (FIG. 29A) and TNFα (FIG. 29B) in pg/ml are shown.

[0097] FIG. 30 provides graphs depicting the levels of the indicated cytokines released from peripheral blood mononuclear cells (PBMCs) in response to the cytomegalovirus pp65 peptide mix (“CMV pp65”) and in the presence of selected 769-hIgG1 humanized variants. “No stim”=unstimulated control (i.e., cells not exposed to CMV pp65). Levels of IL-6 (FIG. 30A) and IL-17A (FIG. 30B) in pg/ml are shown.

[0098] FIG. 31 provides graphs depicting the levels of the indicated cytokines released from peripheral blood mononuclear cells (PBMCs) in response to the cytomegalovirus pp65 peptide mix (“CMV pp65”) and in the presence of selected 769-hIgG1 humanized variants. “No stim”=unstimulated control (i.e., cells not exposed to CMV pp65). Levels of Granzyme A (FIG. 31A) and Granzyme B (FIG. 31B) in pg/ml are shown.

[0099] FIG. 32 provides graphs depicting the levels of the indicated cytokines released from peripheral blood mononuclear cells (PBMCs) in response to the cytomegalovirus pp65 peptide mix (“CMV pp65”) and in the presence of selected 769-hIgG1 humanized variants. “No stim”=unstimulated control (i.e., cells not exposed to CMV pp65). Levels of Perforin (FIG. 32A) and Granulysin (FIG. 32B) in pg/ml are shown.

[0100] FIG. 33 provides graphs depicting the levels of IFN-γ released from peripheral blood mononuclear cells (PBMCs) in response to the cytomegalovirus pp65 peptide mix (“CMV pp65”) and in the presence of selected 769-hIgG1 humanized variants. “No stim”=unstimulated control (i.e., cells not exposed to CMV pp65).

[0101] FIG. 34 depicts an epitope binning sandwich assay for the antibodies indicated.

[0102] FIG. 35 depicts the biochemical characterization of a sialidase-anti-PD-L1 conjugate. FIG. 35A provides a photograph of the non-reduced and reduced PAGE of the purified molecule. FIG. 35B shows the SEC profile of a sialidase-anti-PD-L1 conjugate (ASC1) with a demonstrated purity of 89%.

[0103] FIG. 36 provides graphs showing ForteBio octet binding kinetics of selected 769-hIgG1 humanized variants, a PD-L1 antibody sialidase conjugate (ASC1), and atezolizumab to human PD-L1.

[0104] FIGS. 37A and B depicts the biochemical characterization of a second sialidase-anti-PD-L1 conjugate (ASC3). FIG. 37A depicts the SEC profile of the second sialidase-anti-PD-L1 conjugate (ASC3). FIG. 37B is a graph showing the relative fluorescence units (RFU), indicative of sialidase activity, over increasing substrate concentration. Three batches of the purified second sialidase-anti-PD-L1 conjugate, WG7, WG8, and WG9, were tested and had similar activity.

[0105] FIG. 38 depicts the SEC profile of a third sialidase-anti-PD-L1 conjugate with an inactivate sialidase (ASC4 loss of function or LOF).

[0106] FIGS. 39A and B depict the biochemical characterization of a fourth sialidase-anti-PD-L1 conjugate. FIG. 39A depicts the SEC profile of the fourth sialidase-anti-PD-L1 conjugate (ASC5). FIG. 39B is a graph showing the relative fluorescence units (RFU), indicative of sialidase activity of the fourth sialidase-anti-PD-L1 conjugate (ASC5), over increasing substrate concentration.

[0107] FIG. 40A depicts the SEC profile of a fifth sialidase-anti-PD-L1 conjugate (ASC2). FIG. 40B is a graph showing the relative fluorescence units (RFU), indicative of the sialidase activity of the fifth sialidase-anti-PD-L1 conjugate (ASC2), over increasing substrate concentration. ASC is also depicted.

[0108] FIG. 41 provides graphs showing ForteBio octet binding kinetics of human PD-L1 (FIG. 41A) and cynomolgus PD-L1 (FIG. 41B) binding to selected sialidase-anti-PD-L1 conjugates as compared to h769.T-1A, where the second sialidase PD-L1 heterodimer is ASC2, the third sialidase PD-L1 heterodimer is ASC3, and the fourth sialidase PD-L1 heterodimer is ASC4 LOF.

[0109] FIG. 42 provides the results of an experiment in which a PD-L1 antibody sialidase conjugate or a control molecule was bound to PD-L1-expressing cell lines (HCC827 and NC-H292), and then exposed to a secondary antibody conjugated to a fluorescent moiety. The graphs show mean fluorescence units (MFI) over increasing concentrations of sialidase-anti-PD-L1 conjugate or control molecule, depicting binding of the indicated ASC or antibody to HCC827 (FIG. 42A) and NCI-H292 (FIG. 42B) lung epithelial cell lines.

[0110] FIG. 43 depicts MFI, which is indicative of de-sialylation, over increasing concentrations of sialidase-anti-PD-L1 conjugates on K562 cells (FIG. 43A) and HT-29 cells (FIG. 43B).

[0111] FIG. 44 depicts the in vivo efficacy of the indicated anti-PD-L1 antibody sialidase conjugates in a mouse syngeneic subcutaneous tumor model. Mean tumor volumes over 21 days for the indicated treatments are indicated in FIG. 44A. Triangles indicate dosing. Individual tumor volumes on day 21 are depicted in FIG. 44B. One-way ANOVA (*p<0.05; **p<0.005; ns Non-significant).

[0112] FIG. 45 depicts blocking of the interaction between human PD-L1 and human PD-1-Fc by ASC5, as measured by ELISA. Two independent preparations of ASC5 (Lot 1 and Lot 2) were tested. Results for h769.T-1A and atezolizumab are also shown. Human PD-1-Fc only (no Ab; full PD-L1/PD-1 binding) and buffer only (no antibody and no human PD-1-Fc; no PD-L1/PD-1 binding) were used as controls.

[0113] FIG. 46 depicts blocking of the PD-L1 and PD-1 interaction by ASC5, as measured by fold induction of a PD-1/PD-L1 linked NFAT driven luciferase reporter. Results are shown for three independent preparations of ASC5 (First Lot, Second Lot, and Third Lot). Results are also shown for bivalent anti-PD-L1 antibodies h769.T-1A and atezolizumab.

[0114] FIG. 47 depicts the effect of ASC5 on cytokine release in a DC-T co-culture experiment. ASC5 was tested at 700 nM (100 mg/ml), h769.T-1A and atezolizumab at 70 nM (10 mg/ml), and isotype control (001-1G) at 100 mg/ml. Each data point represents a separate DC-T donor pair. FIG. 47A depicts the fold change of IL-2 for ASC5, h769.T-1A, atezolizumab, and isotype control. FIG. 47B, FIG. 47C, and FIG. 47D show similar data for IFN-γ, IL-8, and MCP1, respectively.

[0115] FIG. 48 depicts in vivo efficacy of ASC5 and h769.T-1A, each at the indicated dose, in a MC38 mouse syngeneic subcutaneous tumor model. Isotype antibody (001-1G) and atezolizumab were used as controls. Mean tumor volumes±SEM over 18 days are depicted in FIG. 48A. Triangles indicate drug administration. Individual tumor volumes on day 18 are depicted in FIG. 48B. One-way ANOVA (**p<0.005).

[0116] FIG. 49 depicts in vivo efficacy of ASC5 and h769.T-1A in a CT26 mouse syngeneic subcutaneous tumor model. Isotype antibody (001-1G) was used as a control. Tumor growth inhibition over 18 days is depicted in FIG. 49A. Individual tumor volumes on day 18 are depicted in FIG. 49B. One-way ANOVA (****p<0.05; ns Non-significant).

[0117] FIG. 50 depicts in vivo efficacy of ASC5, ASC4 LOF, and h769.T-1A, each at the indicated dose, in a CT26 mouse syngeneic subcutaneous tumor model. Isotype antibody (001-1G) and atezolizumab were used as controls. Mean tumor volumes±SEM over 16 days are depicted in FIG. 50A. Individual tumor volumes on day 16 are depicted in FIG. 50B. One-way ANOVA (***p<0.05; ns Non-significant).

[0118] FIG. 51A depicts CDR and framework sequences for heavy chain variable region sequences SEQ ID NO: 164 and SEQ ID NO: 199. FIG. 51B depicts CDR and framework sequences for light chain variable region sequences SEQ ID NO: 167, SEQ ID NO: 200, SEQ ID NO: 201, SEQ ID NO: 202, SEQ ID NO: 204, SEQ ID NO: 242, SEQ ID NO: 243, SEQ ID NO: 244, SEQ ID NO: 245, SEQ ID NO: 246, SEQ ID NO: 247, SEQ ID NO: 248, and SEQ ID NO: 249. Framework sequences are shown in grey.

### DETAILED DESCRIPTION

[0119] The invention is based, in part, upon the discovery of anti-PD-L1 antibodies that impact or otherwise down regulate signaling mediated by PD-1 or PD-L1.

[0120] Furthermore, the invention is also based, in part, upon the discovery that it is possible to produce fusion proteins containing a sialidase enzyme and an anti-PD-L1 immunoglobulin or a portion thereof, e.g., an antigen-binding domain and/or an immunoglobulin Fc domain, and/or antibody conjugates including a sialidase enzyme and an anti-PD-L1 antibody or a portion thereof, e.g., an antigen-binding domain and/or an immunoglobulin Fc domain. The sialidase enzyme portion of the fusion protein and/or antibody conjugate may comprise at least one mutation relative to a wild-type sialidase. The mutations, or combination of mutations, can improve the expression, activity or both the expression and activity of the sialidase to improve its use in cancer diagnosis and/or treatment. The fusion proteins and/or antibody conjugates have suitable substrate specificities and activities to be useful in removing sialic acid and/or sialic acid containing molecules from the surface of cancer cells, e.g., PD-L1-expressing cancer cells, and/or removing sialic acid and/or sialic acid containing molecules from the tumor microenvironment, and/or reducing the concentration of sialic acid and/or sialic acid containing molecules in the tumor microenvironment.

[0121] The invention further relates to pharmaceutical compositions and methods of using antibodies, fusion proteins, and/or antibody conjugates to treat cancer.

### I. Anti-PD-L1 Antibodies

[0122] Among other things, the invention provides antibodies that bind PD-L1 and have the ability to inhibit PD-L1 and/or PD-L1 mediated downstream activities and, therefore, are useful in treating disorders associated with elevated levels of PD-L1, for example, cancer, for example, a cancer that evades a subject's immune system via PD-L1 mediated suppression of a subject's immune system. It is believed that, in certain embodiments, the anti-PD-L1 antibodies described herein disrupt the interaction between PD-L1 and PD-1.

[0123] In general, antibodies are multimeric proteins that contain four polypeptide chains. Two of the polypeptide chains are called immunoglobulin heavy chains (H chains), and two of the polypeptide chains are called immunoglobulin light chains (L chains). The immunoglobulin heavy and light chains are connected by an interchain disulfide bond. The immunoglobulin heavy chains are connected by interchain disulfide bonds. A light chain consists of one variable region (V_{L}) and one constant region (C_{L}). The heavy chain consists of one variable region (V_{H}) and at least three constant regions (CH₁, CH₂ and CH₃). The variable regions determine the binding specificity of the antibody.

[0124] Each variable region contains three hypervariable regions known as complementarity determining regions (CDRs) flanked by four relatively conserved regions known as framework regions (FRs). The extent of the FRs and CDRs has been defined (Kabat, E. A., et al. (1991) SEQUENCES OF PROTEINS OF IMMUNOLOGICAL INTEREST, FIFTH EDITION, U.S. Department of Health and Human Services, NIH Publication No. 91-3242; and Chothia, C. et al. (1987) J. MOL. BIOL. 196:901-917). The three CDRs, referred to as CDR₁, CDR₂, and CDR₃, contribute to the antibody binding specificity. Naturally occurring antibodies have been used as starting material for engineered antibodies, such as chimeric antibodies and humanized antibodies.

[0125] As used herein, unless otherwise indicated, the term “antibody” is understood to mean an intact antibody (e.g., an intact monoclonal antibody) or a fragment thereof, such as an antigen-binding fragment of an antibody (e.g., an antigen-binding fragment of a monoclonal antibody) or a Fc fragment of an antibody (e.g., an Fc fragment of a monoclonal antibody), including an intact antibody, antigen-binding fragment, or Fc fragment that has been modified, engineered, or chemically conjugated. Examples of antigen-binding fragments include Fab, Fab′, (Fab′)₂, Fv, single chain antibodies (e.g., scFv), minibodies, and diabodies. Examples of antibodies that have been modified or engineered include chimeric antibodies, humanized antibodies, and multispecific antibodies (e.g., bispecific antibodies). An example of a chemically conjugated antibody is an antibody conjugated to a toxin moiety.

[0126] As disclosed herein, antibodies of the invention may comprise: (a) an immunoglobulin heavy chain variable region comprising the structure CDR_{H1}-CDR_{H2}-CDR_{H3} and (b) an immunoglobulin light chain variable region comprising the structure CDR_{L1}-CDR_{L2}-CDR_{L3}, wherein the heavy chain variable region and the light chain variable region together define a single binding site for binding PD-L1.

[0127] In certain embodiments, an antibody can comprise: an immunoglobulin heavy chain variable region comprising a CDRH1 comprising the amino acid sequence of SEQ ID NO: 161, a CDRH2 comprising the amino acid sequence of SEQ ID NO: 162, and a CDRH3 comprising the amino acid sequence of SEQ ID NO: 163, wherein CDR_{H1}, CDR_{H2}, and CDR_{H3} sequences are interposed between immunoglobulin FR sequences (PAL769-VH, h769-VH); and/or an immunoglobulin light chain variable region comprising a CDRL1 comprising the amino acid sequence of SEQ ID NO: 165, a CDRL2 comprising the amino acid sequence of SEQ ID NO: 142, and a CDRL3 comprising the amino acid sequence of SEQ ID NO: 166, wherein the CDR_{L1}, CDR_{L2}, and CDR_{L3} sequences are interposed between immunoglobulin FR sequences (PAL769-VL, h769-IF3-VL, h769-tm2-VL, h769-tm3-VL).

[0128] In certain embodiments, an antibody can comprise: an immunoglobulin heavy chain variable region comprising a CDR_{H1} comprising the amino acid sequence of SEQ ID NO: 250, a CDRH2 comprising the amino acid sequence of SEQ ID NO: 251, and a CDRH3 comprising the amino acid sequence of SEQ ID NO: 163, wherein CDR_{H1}, CDR_{H2}, and CDR_{H3} sequences are interposed between immunoglobulin FR sequences (PAL769-VH); and/or an immunoglobulin light chain variable region comprising a CDR_{L1} comprising the amino acid sequence of SEQ ID NO: 253, a CDR_{L2} comprising the amino acid sequence of SEQ ID NO: 254, and a CDR_{L3} comprising the amino acid sequence of SEQ ID NO: 166, wherein the CDR_{L1}, CDR_{L2}, and CDR_{L3} sequences are interposed between immunoglobulin FR sequences (PAL769-VL).

[0129] In certain embodiments, an antibody can comprise: an immunoglobulin heavy chain variable region comprising a CDR_{H1} comprising the amino acid sequence of SEQ ID NO: 250, a CDRH2 comprising the amino acid sequence of SEQ ID NO: 252, and a CDRH3 comprising the amino acid sequence of SEQ ID NO: 163, wherein CDR_{H1}, CDR_{H2}, and CDR_{H3} sequences are interposed between immunoglobulin FR sequences (h769-VH); and/or an immunoglobulin light chain variable region comprising a CDRL1 comprising the amino acid sequence of SEQ ID NO: 255, a CDR_{L2} comprising the amino acid sequence of SEQ ID NO: 254, and a CDR_{L3} comprising the amino acid sequence of SEQ ID NO: 166, wherein the CDR_{L1}, CDR_{L2}, and CDR_{L3} sequences are interposed between immunoglobulin FR sequences (h769-IF3-VL, h769-tm2-VL, h769-tm3-VL).

[0130] In certain embodiments, an antibody can comprise: an immunoglobulin heavy chain variable region comprising a CDRH1 comprising the amino acid sequence of SEQ ID NO: 161, a CDRH2 comprising the amino acid sequence of SEQ ID NO: 162, and a CDRH3 comprising the amino acid sequence of SEQ ID NO: 163, wherein CDR_{H1}, CDR_{H2}, and CDR_{H3} sequences are interposed between immunoglobulin FR sequences (PAL769-VH, h769-VH); and/or an immunoglobulin light chain variable region comprising a CDRL1 comprising the amino acid sequence of SEQ ID NO: 165, a CDRL2 comprising the amino acid sequence of SEQ ID NO: 142, and a CDRL3 comprising the amino acid sequence of SEQ ID NO: 203, wherein the CDR_{L1}, CDR_{L2}, and CDR_{L3} sequences are interposed between immunoglobulin FR sequences (h769.T-VL).

[0131] In certain embodiments, an antibody can comprise: an immunoglobulin heavy chain variable region comprising a CDR_{H1} comprising the amino acid sequence of SEQ ID NO: 250, a CDR_{H2} comprising the amino acid sequence of SEQ ID NO: 252, and a CDRH3 comprising the amino acid sequence of SEQ ID NO: 163, wherein CDR_{H1}, CDR_{H2}, and CDR_{H3} sequences are interposed between immunoglobulin FR sequences (h769-VH); and/or an immunoglobulin light chain variable region comprising a CDRL1 comprising the amino acid sequence of SEQ ID NO: 255, a CDR_{L2} comprising the amino acid sequence of SEQ ID NO: 254, and a CDR_{L3} comprising the amino acid sequence of SEQ ID NO: 203, wherein the CDR_{L1}, CDR_{L2}, and CDR_{L3} sequences are interposed between immunoglobulin FR sequences (h769.T-VL).

[0132] In certain embodiments, an antibody can comprise: an immunoglobulin heavy chain variable region comprising a CDRH1 comprising the amino acid sequence of SEQ ID NO: 129, a CDRH2 comprising the amino acid sequence of SEQ ID NO: 130, and a CDRH3 comprising the amino acid sequence of SEQ ID NO: 131, wherein CDR_{H1}, CDR_{H2}, and CDR_{H3} sequences are interposed between immunoglobulin FR sequences (PAL752-VH); and/or an immunoglobulin light chain variable region comprising a CDRL1 comprising the amino acid sequence of SEQ ID NO: 133, a CDRL2 comprising the amino acid sequence of SEQ ID NO: 134, and a CDRL3 comprising the amino acid sequence of SEQ ID NO: 135, wherein the CDR_{L1}, CDR_{L2}, and CDR_{L3} sequences are interposed between immunoglobulin FR sequences (PAL752-VL).

[0133] In certain embodiments, an antibody can comprise: an immunoglobulin heavy chain variable region comprising a CDRH1 comprising the amino acid sequence of SEQ ID NO: 137, a CDRH2 comprising the amino acid sequence of SEQ ID NO: 138, and a CDRH3 comprising the amino acid sequence of SEQ ID NO: 139, wherein CDR_{H1}, CDR_{H2}, and CDR_{H3} sequences are interposed between immunoglobulin FR sequences (PAL759-VH); and/or an immunoglobulin light chain variable region comprising a CDRL1 comprising the amino acid sequence of SEQ ID NO: 141, a CDRL2 comprising the amino acid sequence of SEQ ID NO: 142, and a CDRL3 comprising the amino acid sequence of SEQ ID NO: 143, wherein the CDR_{L1}, CDR_{L2}, and CDR_{L3} sequences are interposed between immunoglobulin FR sequences (PAL759-VL).

[0134] In certain embodiments, an antibody can comprise: an immunoglobulin heavy chain variable region comprising a CDRH1 comprising the amino acid sequence of SEQ ID NO: 145, a CDRH2 comprising the amino acid sequence of SEQ ID NO: 146, and a CDRH3 comprising the amino acid sequence of SEQ ID NO: 147, wherein CDR_{H1}, CDR_{H2}, and CDR_{H3} sequences are interposed between immunoglobulin FR sequences (PAL760-VH); and/or an immunoglobulin light chain variable region comprising a CDRL1 comprising the amino acid sequence of SEQ ID NO: 149, a CDRL2 comprising the amino acid sequence of SEQ ID NO: 150, and a CDRL3 comprising the amino acid sequence of SEQ ID NO: 151, wherein the CDR_{L1}, CDR_{L2}, and CDR_{L3} sequences are interposed between immunoglobulin FR sequences (PAL760-VL).

[0135] In certain embodiments, an antibody can comprise: an immunoglobulin heavy chain variable region comprising a CDRH1 comprising the amino acid sequence of SEQ ID NO: 153, a CDRH2 comprising the amino acid sequence of SEQ ID NO: 154, and a CDRH3 comprising the amino acid sequence of SEQ ID NO: 155, wherein CDR_{H1}, CDR_{H2}, and CDR_{H3} sequences are interposed between immunoglobulin FR sequences (PAL767-VH); and/or an immunoglobulin light chain variable region comprising a CDRL1 comprising the amino acid sequence of SEQ ID NO: 157, a CDRL2 comprising the amino acid sequence of SEQ ID NO: 158, and a CDRL3 comprising the amino acid sequence of SEQ ID NO: 159, wherein the CDR_{L1}, CDR_{L2}, and CDR_{L3} sequences are interposed between immunoglobulin FR sequences (PAL767-VL).

[0136] In certain embodiments, an antibody can comprise: an immunoglobulin heavy chain variable region comprising a CDRH1 comprising the amino acid sequence of SEQ ID NO: 161, a CDRH2 comprising the amino acid sequence of SEQ ID NO: 168, and a CDRH3 comprising the amino acid sequence of SEQ ID NO: 169, wherein CDR_{H1}, CDR_{H2}, and CDR_{H3} sequences are interposed between immunoglobulin FR sequences (PAL771-VH); and/or an immunoglobulin light chain variable region comprising a CDRL1 comprising the amino acid sequence of SEQ ID NO: 171, a CDRL2 comprising the amino acid sequence of SEQ ID NO: 172, and a CDRL3 comprising the amino acid sequence of SEQ ID NO: 173, wherein the CDR_{L1}, CDR_{L2}, and CDR_{L3} sequences are interposed between immunoglobulin FR sequences (PAL771-VL).

[0137] In certain embodiments, an antibody can comprise: an immunoglobulin heavy chain variable region comprising a CDRH1 comprising the amino acid sequence of SEQ ID NO: 175, a CDRH2 comprising the amino acid sequence of SEQ ID NO: 176, and a CDRH3 comprising the amino acid sequence of SEQ ID NO: 177, wherein CDR_{H1}, CDR_{H2}, and CDR_{H3} sequences are interposed between immunoglobulin FR sequences (PAL785-VH); and/or an immunoglobulin light chain variable region comprising a CDRL1 comprising the amino acid sequence of SEQ ID NO: 179, a CDRL2 comprising the amino acid sequence of SEQ ID NO: 180, and a CDRL3 comprising the amino acid sequence of SEQ ID NO: 181, wherein the CDR_{L1}, CDR_{L2}, and CDR_{L3} sequences are interposed between immunoglobulin FR sequences (PAL785-VL).

[0138] In certain embodiments, an antibody can comprise: an immunoglobulin heavy chain variable region comprising a CDRH1 comprising the amino acid sequence of SEQ ID NO: 183, a CDRH2 comprising the amino acid sequence of SEQ ID NO: 184, and a CDRH3 comprising the amino acid sequence of SEQ ID NO: 185, wherein CDR_{H1}, CDR_{H2}, and CDR_{H3} sequences are interposed between immunoglobulin FR sequences (PAL787-VH); and/or an immunoglobulin light chain variable region comprising a CDRL1 comprising the amino acid sequence of SEQ ID NO: 187, a CDRL2 comprising the amino acid sequence of SEQ ID NO: 188, and a CDRL3 comprising the amino acid sequence of SEQ ID NO: 189, wherein the CDR_{L1}, CDR_{L2}, and CDR_{L3} sequences are interposed between immunoglobulin FR sequences (PAL787-VL).

[0139] In certain embodiments, an antibody can comprise: an immunoglobulin heavy chain variable region comprising a CDRH1 comprising the amino acid sequence of SEQ ID NO: 191, a CDRH2 comprising the amino acid sequence of SEQ ID NO: 192, and a CDRH3 comprising the amino acid sequence of SEQ ID NO: 193, wherein CDR_{H1}, CDR_{H2}, and CDR_{H3} sequences are interposed between immunoglobulin FR sequences (PAL788-VH); and/or an immunoglobulin light chain variable region comprising a CDRL1 comprising the amino acid sequence of SEQ ID NO: 195, a CDRL2 comprising the amino acid sequence of SEQ ID NO: 196, and a CDRL3 comprising the amino acid sequence of SEQ ID NO: 197, wherein the CDR_{L1}, CDR_{L2}, and CDR_{L3} sequences are interposed between immunoglobulin FR sequences (PAL788-VL).

[0140] Similarly, the antibodies disclosed herein can comprise an immunoglobulin heavy chain variable region and an immunoglobulin light chain variable region.

[0141] In certain embodiments, the antibody comprises an immunoglobulin heavy chain variable region comprising an amino acid sequence selected from SEQ ID NO: 164, SEQ ID NO: 199, SEQ ID NO: 132, SEQ ID NO: 140, SEQ ID NO: 148, SEQ ID NO: 156, SEQ ID NO: 170, SEQ ID NO: 178, SEQ ID NO: 186, and SEQ ID NO: 194; and/or an immunoglobulin light chain variable region comprising an amino acid sequence selected from SEQ ID NO: 167, SEQ ID NO: 200, SEQ ID NO: 201, SEQ ID NO: 202, SEQ ID NO: 204, SEQ ID NO: 136, SEQ ID NO: 144, SEQ ID NO: 152, SEQ ID NO: 160, SEQ ID NO: 174, SEQ ID NO: 182, SEQ ID NO: 190, SEQ ID NO: 198, SEQ ID NO: 242, SEQ ID NO: 243, SEQ ID NO: 244, SEQ ID NO: 245, SEQ ID NO: 246, SEQ ID NO: 247, SEQ ID NO: 248 and SEQ ID NO: 249.

[0142] In certain embodiments, the antibody comprises an immunoglobulin heavy chain variable region comprising the amino acid sequence of SEQ ID NO: 164 (PAL769-VH), and an immunoglobulin light chain variable region comprising the amino acid sequence of SEQ ID NO: 167 (PAL769-VL).

[0143] In certain embodiments, the antibody comprises an immunoglobulin heavy chain variable region comprising the amino acid sequence of SEQ ID NO: 199 (h769-VH), and an immunoglobulin light chain variable region comprising the amino acid sequence of SEQ ID NO: 200 (h769-IF3-VL).

[0144] In certain embodiments, the antibody comprises an immunoglobulin heavy chain variable region comprising the amino acid sequence of SEQ ID NO: 199 (h769-VH), and an immunoglobulin light chain variable region comprising the amino acid sequence of SEQ ID NO: 201 (h769-tm2-VL).

[0145] In certain embodiments, the antibody comprises an immunoglobulin heavy chain variable region comprising the amino acid sequence of SEQ ID NO: 199 (h769-VH), and an immunoglobulin light chain variable region comprising the amino acid sequence of SEQ ID NO: 202 (h769-tm3-VL).

[0146] In certain embodiments, the antibody comprises an immunoglobulin heavy chain variable region comprising the amino acid sequence of SEQ ID NO: 199 (h769-VH), and an immunoglobulin light chain variable region comprising the amino acid sequence of SEQ ID NO: 204 (h769.T-VL).

[0147] In certain embodiments, the antibody comprises an immunoglobulin heavy chain variable region comprising the amino acid sequence of SEQ ID NO: 132 (PAL752-VH), and an immunoglobulin light chain variable region comprising the amino acid sequence of SEQ ID NO: 136 (PAL752-VL).

[0148] In certain embodiments, the antibody comprises an immunoglobulin heavy chain variable region comprising the amino acid sequence of SEQ ID NO: 140 (PAL759-VH), and an immunoglobulin light chain variable region comprising the amino acid sequence of SEQ ID NO: 144 (PAL759-VL).

[0149] In certain embodiments, the antibody comprises an immunoglobulin heavy chain variable region comprising the amino acid sequence of SEQ ID NO: 148 (PAL760-VH), and an immunoglobulin light chain variable region comprising the amino acid sequence of SEQ ID NO: 152 (PAL760-VL).

[0150] In certain embodiments, the antibody comprises an immunoglobulin heavy chain variable region comprising the amino acid sequence of SEQ ID NO: 156 (PAL767-VH), and an immunoglobulin light chain variable region comprising the amino acid sequence of SEQ ID NO: 160 (PAL767-VL).

[0151] In certain embodiments, the antibody comprises an immunoglobulin heavy chain variable region comprising the amino acid sequence of SEQ ID NO: 170 (PAL771-VH), and an immunoglobulin light chain variable region comprising the amino acid sequence of SEQ ID NO: 174 (PAL771-VL).

[0152] In certain embodiments, the antibody comprises an immunoglobulin heavy chain variable region comprising the amino acid sequence of SEQ ID NO: 178 (PAL785-VH), and an immunoglobulin light chain variable region comprising the amino acid sequence of SEQ ID NO: 182 (PAL785-VL).

[0153] In certain embodiments, the antibody comprises an immunoglobulin heavy chain variable region comprising the amino acid sequence of SEQ ID NO: 186 (PAL787-VH), and an immunoglobulin light chain variable region comprising the amino acid sequence of SEQ ID NO: 190 (PAL787-VL).

[0154] In certain embodiments, the antibody comprises an immunoglobulin heavy chain variable region comprising the amino acid sequence of SEQ ID NO: 194 (PAL788-VH), and an immunoglobulin light chain variable region comprising the amino acid sequence of SEQ ID NO: 198 (PAL788-VL).

[0155] In certain embodiments the antibody comprises an immunoglobulin heavy chain variable region comprising an amino acid sequence of

(SEQ ID NO: 236)
EVQLX₁X₂SGAEX₃X₄KPGAX₅VX₆X₇SCX₈X₉SGFNIKDTYMHWVX₁₀Q
X₁₁PX₁₂X₁₃GLEWX₁₄GX₁₅IDPANDNTX₁₆YX₁₇X₁₈KFQX₁₉X₂₀
X₂₁TITADTSX₂₂DTAYX₂₃X₂₄LSSLX₂₅SEDTAVYYCAREGYGGSYGE
GYWGQGTX₂₆X₂₇TVSS,

wherein X₁ is Gln or Val, X₂ is Glu or Gln, X₃ is Leu or Val, X₄ is Val or Lys, X₅ is Ser or Thr, X₆ is Thr or Lys, X₇ is Leu or Ile, X₈ is Thr or Lys, X₉ is Ala or Val, X₁₀ is Lys or Gln, X₁₁ is Arg or Ala, X₁₂ is Glu or Gly, X₁₃ is Gln or Lys, X₁₄ is Ile or Met, X₁₅ is Arg or Leu, X₁₆ is Lys or Ile, X₁₇ is Asp or Ala, X₁₈ is Pro or Glu, X₁₉ is Asp or Gly, X₂₀ is Lys or Arg, X₂₁ is Ala or Val, X₂₂ is Ser or Thr, X₂₃ is Leu or Met, X₂₄ is Arg or Glu, X₂₅ is Thr or Arg, X₂₆ is Thr or Leu, and X₂₇ is Leu or Val; and/or an immunoglobulin light chain variable region comprising an amino acid sequence of

(SEQ ID NO: 237)
X₁IVMTQX₂PX₃X₄LX₅X₆SX₇GX₈RVTX₉X₁₀CX₁₁ASQSVSNDX₁₂
X₁₃WYQQKPGQX₁₄PX₁₅LLIYYASIRFTGX₁₆PX₁₇RFX₁₈GSGX₁₉GT
DFTX₂₀TIX₂₁X₂₂X₂₃QX₂₄EDX₂₅AVYX₂₆CQQDYX₂₇SPWTFGX₂₈G
TKX₂₉EIK,

wherein X₁ is Ser or Glu, X₂ is Thr or Ser, X₃ is Lys or Pro, X₄ is Phe or Thr, X₅ is Leu or Ser, X₆ is Val or Leu, X₇ is Ala or Pro, X₈ is Asp or Glu, X₉ is Ile or Leu, X₁₀ is Thr or Ser, X₁₁ is Lys or Arg, X₁₂ is Val or Leu, X₁₃ is Ile or Ser, X₁₄ is Ser or Ala, X₁₅ is Lys or Arg, X₁₆ is Val or Ile, X₁₇ is Asp or Ala, X₁₈ is Ala or Ser, X₁₉ is Tyr or Ser, X₂₀ is Phe or Leu, X₂₁ is Asn or Ser, X₂₂ is Thr or Ser, X₂₃ is Val or Leu, X₂₄ is Ala or Pro, X₂₅ is Leu or Phe, X₂₆ is Phe or Tyr, X₂₇ is Tyr or Thr, X₂₈ is Gly or Gln, and X₂₉ is Leu or Val.

[0156] In certain embodiments, an isolated antibody that binds PD-L1 comprises an immunoglobulin heavy chain variable region comprising an amino acid sequence that is at least 70%, 75%, 80%, 85%, 86%, 87%, 88%, 89%, 89.5%, 90%, 90.5%, 91%, 92%, 93%, 94%, 95%, 96%, 97%, 98%, or 99% identical to the entire variable region and/or the framework region sequences of an amino acid sequence selected from SEQ ID NO: 164, SEQ ID NO: 199, SEQ ID NO: 132, SEQ ID NO: 140, SEQ ID NO: 148, SEQ ID NO: 156, SEQ ID NO: 170, SEQ ID NO: 178, SEQ ID NO: 186, and SEQ ID NO: 194. Alternatively or in addition, an isolated antibody that binds PD-L1 comprises an immunoglobulin light chain variable region comprising an amino acid sequence that is at least 70%, 75%, 80%, 85%, 86%, 87%, 88%, 89%, 90%, 91%, 92%, 93%, 94%, 94.5%, 95%, 95.5%, 96%, 97%, 98%, or 99% identical to the entire variable region and/or the framework region sequences of an amino acid sequence selected from SEQ ID NO: 167, SEQ ID NO: 200, SEQ ID NO: 201, SEQ ID NO: 202, SEQ ID NO: 204, SEQ ID NO: 136, SEQ ID NO: 144, SEQ ID NO: 152, SEQ ID NO: 160, SEQ ID NO: 174, SEQ ID NO: 182, SEQ ID NO: 190, SEQ ID NO: 198, SEQ ID NO: 242, SEQ ID NO: 243, SEQ ID NO: 244, SEQ ID NO: 245, SEQ ID NO: 246, SEQ ID NO: 247, SEQ ID NO: 248 and SEQ ID NO: 249. Identification of CDR and framework sequences is within the level of ordinary skill in the art, and it is understood that the boundaries between CDR and framework sequences may depend upon the definition or convention that is used (e.g., Kabat, Chothia, IMGT, etc.). Exemplary CDR and framework sequences for heavy chain variable region sequences SEQ ID NO: 164 and SEQ ID NO: 199 are depicted in FIG. 51A, and exemplary CDR and framework sequences for light chain variable region sequences SEQ ID NO: 167, SEQ ID NO: 200, SEQ ID NO: 201, SEQ ID NO: 202, SEQ ID NO: 204, SEQ ID NO: 242, SEQ ID NO: 243, SEQ ID NO: 244, SEQ ID NO: 245, SEQ ID NO: 246, SEQ ID NO: 247, SEQ ID NO: 248, and SEQ ID NO: 249 are depicted in FIG. 51B.

[0157] Sequence identity may be determined in various ways that are within the skill in the art, e.g., using publicly available computer software such as BLAST, BLAST-2, ALIGN or Megalign (DNASTAR) software. BLAST (Basic Local Alignment Search Tool) analysis using the algorithm employed by the programs blastp, blastn, blastx, tblastn and tblastx (Karlin et al., (1990) PROC. NATL. ACAD. SCI. USA 87:2264-2268; Altschul, (1993) J. MOL. EVOL. 36, 290-300; Altschul et al., (1997) NUCLEIC ACIDS RES. 25:3389-3402, incorporated by reference) are tailored for sequence similarity searching. For a discussion of basic issues in searching sequence databases, see Altschul et al., (1994) NATURE GENETICS 6:119-129, which is fully incorporated by reference. Those skilled in the art can determine appropriate parameters for measuring alignment, including any algorithms needed to achieve maximal alignment over the full length of the sequences being compared. The search parameters for histogram, descriptions, alignments, expect (i.e., the statistical significance threshold for reporting matches against database sequences), cutoff, matrix and filter are at the default settings. The default scoring matrix used by blastp, blastx, tblastn, and tblastx is the BLOSUM62 matrix (Henikoff et al., (1992) PROC. NATL. ACAD. SCI. USA 89:10915-10919, fully incorporated by reference). Four blastn parameters may be adjusted as follows: Q=10 (gap creation penalty); R=10 (gap extension penalty); wink=1 (generates word hits at every wink.sup.th position along the query); and gapw=16 (sets the window width within which gapped alignments are generated). The equivalent Blastp parameter settings may be Q=9; R=2; wink=1; and gapw=32. Searches may also be conducted using the NCBI (National Center for Biotechnology Information) BLAST Advanced Option parameter (e.g.: −G, Cost to open gap [Integer]: default=5 for nucleotides/11 for proteins; −E, Cost to extend gap [Integer]: default=2 for nucleotides/1 for proteins; −q, Penalty for nucleotide mismatch [Integer]: default=−3; −r, reward for nucleotide match [Integer]: default=1; −e, expect value [Real]: default=10; −W, wordsize [Integer]: default=11 for nucleotides/28 for megablast/3 for proteins; −y, Dropoff (X) for blast extensions in bits: default=20 for blastn/7 for others; −X, X dropoff value for gapped alignment (in bits): default=for all programs, not applicable to blastn; and −Z, final X dropoff value for gapped alignment (in bits): 50 for blastn, 25 for others). ClustalW for pairwise protein alignments may also be used (default parameters may include, e.g., Blosum62 matrix and Gap Opening Penalty=10 and Gap Extension Penalty=0.1). A Bestfit comparison between sequences, available in the GCG package version 10.0, uses DNA parameters GAP=50 (gap creation penalty) and LEN=3 (gap extension penalty) and the equivalent settings in protein comparisons are GAP=8 and LEN=2.

[0158] In each of the foregoing embodiments, it is contemplated herein that immunoglobulin heavy chain variable region sequences and/or light chain variable region sequences that together bind PD-L1 may each contain amino acid alterations (e.g., at least 1, 2, 3, 4, 5, or 10 amino acid substitutions, deletions, or additions) in the framework regions of the heavy and/or light chain variable regions.

[0159] In certain embodiments, it is contemplated that a heavy chain variable region sequence, for example, the V H sequence of SEQ ID NO: 164, SEQ ID NO: 199, SEQ ID NO: 132, SEQ ID NO: 140, SEQ ID NO: 148, SEQ ID NO: 156, SEQ ID NO: 170, SEQ ID NO: 178, SEQ ID NO: 186, or SEQ ID NO: 194, or the amino acid variants thereof, may be covalently linked to a variety of heavy chain constant region sequences known in the art. Similarly, it is contemplated that a light chain variable region sequence, for example, the VL of SEQ ID NO: 167, SEQ ID NO: 200, SEQ ID NO: 201, SEQ ID NO: 202, SEQ ID NO: 204, SEQ ID NO: 136, SEQ ID NO: 144, SEQ ID NO: 152, SEQ ID NO: 160, SEQ ID NO: 174, SEQ ID NO: 182, SEQ ID NO: 190, SEQ ID NO: 198, SEQ ID NO: 242, SEQ ID NO: 243, SEQ ID NO: 244, SEQ ID NO: 245, SEQ ID NO: 246, SEQ ID NO: 247, SEQ ID NO: 248 or SEQ ID NO: 249, or the amino acid variants thereof, may be covalently linked to a variety of light chain constant region sequences known in the art.

[0160] For example, the antibody molecule may have a heavy chain constant region chosen from, e.g., the heavy chain constant regions of IgG1, IgG2, IgG3, IgG4, IgM, IgA1, IgA2, IgD, and IgE; particularly, chosen from, e.g., the (e.g., human) heavy chain constant regions of IgG1, IgG2, IgG3, and IgG4. In another embodiment, the antibody molecule has a light chain constant region chosen from, e.g., the (e.g., human) light chain constant regions of kappa or lambda. The constant region can be altered, e.g., mutated, to modify the properties of the antibody (e.g., to increase or decrease one or more of: Fc receptor binding, antibody glycosylation, the number of cysteine residues, effector cell function, and/or complement function). In one embodiment the antibody has effector function and can fix complement. In other embodiments the antibody does not recruit effector cells or fix complement. In another embodiment, the antibody has reduced or no ability to bind an Fc receptor. For example, it is an isotype or subtype, fragment or other mutant, which does not support binding to an Fc receptor, e.g., it has a mutagenized or deleted Fc receptor binding region.

[0161] In certain embodiments, the constant region of the heavy chain of the antibody is a human IgG1 isotype, having an amino acid sequence:

(SEQ ID NO: 227)
ASTKGPSVFPLAPSSKSTSGGTAALGCLVKDYFPEPVTVSWNSGALTSGVHTFPAVLOSS

[chemical structure]

[chemical structure]

STYRVVSVLTVLHQDWLNGKEYKCKVSNKALPAPIEKTISKAKGQPREPQVYTLPPSRDE
LTKNQVSLTCLVKGFYPSDIAVEWESNGQPENNYKTTPPVLDSDGSFFLYSKLTVDKSRW
QQGNVFSCSVMHEALHNHYTQKSLSLSPGK.

[0162] In certain embodiments, the human IgG1 constant region is modified at amino acid Asn297 (boxed in SEQ ID NO: 227 in the preceding paragraph) to prevent to glycosylation of the antibody, for example Asn297Ala (N297A) or Asn297Gly (N297G). In certain embodiments, the constant region of the antibody is modified at amino acid Leu235 (boxed in SEQ ID NO: 227 in the preceding paragraph) to alter Fc receptor interactions, for example Leu235Glu (L235E) or Leu235Ala (L235A). In certain embodiments, the constant region of the antibody is modified at amino acid Leu234 (boxed in SEQ ID NO: 227 in the preceding paragraph) to alter Fc receptor interactions, e.g., Leu234Ala (L234A). In certain embodiments, the constant region of the antibody is modified at amino acid Glu233 (boxed in SEQ ID NO: 227 in the preceding paragraph), e.g., Glu233Pro (E233P). In certain embodiments, the constant region of the antibody is altered at both amino acid 234 and 235, for example Leu234Ala and Leu235Ala (L234A/L235A). In certain embodiments, the constant region of the antibody is altered at amino acids 233, 234, and 235, for example, Glu233Pro, Leu234Ala, and Leu235Ala (E233P L234A/L235A) (Armour K L. et al. (1999) EUR. J. IMMUNOL. 29(8):2613-24). In certain embodiments, the constant region of the antibody is altered at amino acids 234, 235 and 329, for example, Leu234Ala, Leu235Ala and Pro329Gly. (see, e.g., U.S. Pat. No. 8,969,526). All residue numbers are according to EU numbering (Kabat, E. A., et al., supra).

[0163] In certain embodiments, the constant region of the heavy chain of the antibody is a human IgG1 isotype, having an amino acid sequence:

(SEQ ID NO: 221)
ASTKGPSVFPLAPSSKSTSGGTAALGCLVKDYFPEPVTVSWNSGALTSGVHTFPAVLOSS

[chemical structure]

[chemical structure]

STYRVVSVLTVLHQDWLNGKEYKCKVSNKALPAPIEKTISKAKGQPREPQVYTLPPSREE
MTKNQVSLTCLVKGFYPSDIAVEWESNGOPENNYKTTPPVLDSDGSFFLYSKLTVDKSRW
QQGNVFSCSVMHEALHNHYTQKSLSLSPGK.

[0164] In certain embodiments, the human IgG1 constant region is modified at amino acid Asn297 (boxed in SEQ ID NO: 221 the preceding paragraph) to prevent to glycosylation of the antibody, for example Asn297Ala (N297A) or Asn297Gly (N297G). For example, in certain embodiments, the human IgG1 constant region comprises SEQ ID NO: 222, SEQ ID NO: 225, or SEQ ID NO: 226. In certain embodiments, the constant region of the antibody is modified at amino acid Leu235 (boxed in SEQ ID NO: 221 the preceding paragraph) to alter Fc receptor interactions, for example Leu235Glu (L235E) or Leu235Ala (L235A). In certain embodiments, the constant region of the antibody is modified at amino acid Leu234 (boxed in SEQ ID NO: 221 the preceding paragraph) to alter Fc receptor interactions, e.g., Leu234Ala (L234A). In certain embodiments, the constant region of the antibody is modified at amino acid Glu233 (boxed in SEQ ID NO: 221 the preceding paragraph), e.g., Glu233Pro (E233P). In certain embodiments, the constant region of the antibody is altered at both amino acid 234 and 235, for example Leu234Ala and Leu235Ala (L234A/L235A). In certain embodiments, the constant region of the antibody is altered at amino acids 233, 234, and 234, for example, Glu233Pro, Leu234Ala, and Leu235Ala (E233P L234A/L235A) (Armour K L. et al. (1999) EUR. J. IMMUNOL. 29(8):2613-24). In certain embodiments, the constant region of the antibody is altered at amino acids 234, 235 and 329, for example, Leu234Ala, Leu235Ala and Pro329Gly. (see, e.g., U.S. Pat. No. 8,969,526). All residue numbers are according to EU numbering (Kabat, E. A., et al., supra).

[0165] In certain embodiments, the human IgG1 constant region is modified to comprise either a “knob” mutation, e.g., T366Y, or a “hole” mutation, e.g., Y407T, for heterodimerization with a second constant region (residue numbers according to EU numbering (Kabat, E. A., et al., supra)). For example, in certain embodiments, the human IgG1 constant region comprises a Y407T mutation (e.g., the human IgG1 constant region comprises SEQ ID NO: 223 or SEQ ID NO: 225). In certain embodiments, the human IgG1 constant region comprises a T366Y mutation (e.g., the human IgG1 constant region comprises SEQ ID NO: 224 or SEQ ID NO: 226).

[0166] In certain embodiments, the constant region of the heavy chain of the antibody is a human IgG1 isotype, e.g., an allotype of the human IgG1 isotype, e.g., the IgG1 Glm3 allotype. Exemplary human IgG1 allotypes are described in Magdelaine-Beuzelin et al. (2009) PHARMACOGENET. GENOMICS 19(5):383-7.

[0167] In certain embodiments, the constant region of the heavy chain of the antibody is a human IgG2 isotype, having an amino acid sequence:

(SEQ ID NO: 228)
ASTKGPSVFPLAPCSRSTSESTAALGCLVKDYFPEPVTVSWNSGALTSGVHTFPAVLQSS
GLYSLSSVVTVPSSNFGTQTYTCNVDHKPSNTKVDKTVERKCCVECPPCPAPPVAGPSVF

[chemical structure]

VVSVLTVVHQDWLNGKEYKCKVSNKGLPAPIEKTISKTKGQPREPQVYTLPPSREEMTKN
QVSLTCLVKGFYPSDISVEWESNGQPENNYKTTPPMLDSDGSFFLYSKLTVDKSRWQQGN
VFSCSVMHEALHNHYTQKSLSLSPGK.

[0168] In certain embodiments, the human IgG2 constant region is modified at amino acid Asn297 (boxed in SEQ ID NO: 228 in the preceding paragraph) to prevent to glycosylation of the antibody, e.g., Asn297A1a (N297A) or Asn297Gly (N297G), where the residue numbers are according to EU numbering (Kabat, E. A., et al., supra).

[0169] In certain embodiments, the constant region of the heavy chain of the antibody is an human IgG3 isotype, having an amino acid sequence:

(SEQ ID NO: 229)
ASTKGPSVFPLAPCSRSTSGGTAALGCLVKDYFPEPVTVSWNSGALTSGVHTFPAVLQSS
GLYSLSSVVTVPSSSLGTQTYTCNVNHKPSNTKVDKRVELKTPLGDTTHTCPRCPEPKSC
DTPPPCPRCPEPKSCDTPPPCPRCPEPKSCDTPPPCPRCPAPELLGGPSVFLFPPKPKDT

[chemical structure]

QDWLNGKEYKCKVSNKALPAPIEKTISKTKGQPREPQVYTLPPSREEMTKNQVSLTCLVK
GFYPSDIAVEWESSGQPENNYNTTPPMLDSDGSFFLYSKLTVDKSRWQQGNIFSCSVMHE

[chemical structure]

[0170] In certain embodiments, the human IgG3 constant region is modified at amino acid Asn297 (boxed in SEQ ID NO: 229 in the preceding paragraph) to prevent to glycosylation of the antibody, e.g., Asn297Ala (N297A) or Asn297Gly (N297G). In certain embodiments, the human IgG3 constant region is modified at amino acid Arg435 (boxed in SEQ ID NO: 229 in the preceding paragraph) to extend the half-life, e.g., Arg435H (R435H). All residue numbers are according to EU numbering (Kabat, E. A., et al., supra).

[0171] In certain embodiments, the constant region of the heavy chain of the antibody is an human IgG4 isotype, having an amino acid sequence:

(SEQ ID NO: 230)
ASTKGPSVFPLAPCSRSTSESTAALGCLVKDYFPEPVTVSWNSGALTSGVHTFPAVLQSS

[chemical structure]

[chemical structure]

RVVSVLTVLHQDWLNGKEYKCKVSNKGLPSSIEKTISKAKGQPREPQVYTLPPSQEEMTK
NQVSLTCLVKGFYPSDIAVEWESNGOPENNYKTTPPVLDSDGSFFLYSRLTVDKSRWQEG
NVFSCSVMHEALHNHYTQKSLSLSLGK.

[0172] In certain embodiments, the human IgG4 constant region is modified within the hinge region to prevent or reduce strand exchange, e.g., in certain embodiments human IgG4 constant region is modified at Ser228 (boxed in SEQ ID NO: 230 in the preceding paragraph), e. Ser228Pro (S228P). In other embodiments, the human IgG4 constant region is modified at amino acid Leu235 (boxed in SEQ ID NO: 230 in the preceding paragraph) to alter Fc receptor interactions, e.g., Leu235Glu (1,235E). In certain embodiments, the human IgG4 constant region is modified at both Ser228 and Leu335, e.g., Ser228Pro and. Leu235Glu. (S228P/L235E). In certain embodiments, the human IgG4 constant region is modified at amino acid Asn297 (boxed in SEQ ID NO: 230 in the preceding paragraph) to prevent to glycosylation of the antibody, e.g., Asn297Ala (N297A) or Asn297Gly (N297G). All residue numbers are according to EU numbering (Kabat, E. A., et al., supra).

[0173] In certain embodiments, the human IgG constant region is modified to enhance FcRn binding. Examples of Fc mutations that enhance binding to FcRn are Met252Tyr, Ser254Thr, Thr256Glu (M252Y, S2541, T256E, respectively) (Dall'Acqua et al (2006) J. BIOL. CHEM. 281(33): 23514-23524), or Met428Leu and Asn434Ser (M428L, N434S) (Zalevsky et al (2010) NATURE BIOTECH. 28(2): 157-159). All residue numbers are according to EU numbering (Kabat, E. A., et al., supra).

[0174] In certain embodiments, the human IgG constant region is modified to alter antibody-dependent cellular cytotoxicity (ADCC) and/or complement-dependent cytotoxicity (CDC), e.g., the amino acid modifications described in Natsume et al. (2008) CANCER RES. 68(10): 3863-72; Idusogie et al. (2001) J. IMMUNOL. 166(4): 2571-5; Moore et al, (2010) MABS 2(2): 181-189; Lazar et al. (2006) PROC. NATL. ACAD. SCI. USA 103(11): 4005-4010, Shields et al. (2001) J. BIOL. CHEM. 276(9): 6591-6604; Stavenhagen et al. (2007) CANCER RES. 67(18): 8882-8890; Stavenhagen et al. (2008) ADVAN. ENZYME REGUL. 48: 152-164; Alegre et al. (1992) J. IMMUNOL. 148: 3461-3468.

[0175] In certain embodiments, the human IgG constant region is modified to induce heterodimerization. For example, a heavy chain having an amino acid modification within the CH3 domain at Thr366, e.g., a substitution with a more bulky amino acid, e.g., Tyr (T366W), is able to preferentially pair with a second heavy chain having a CH3 domain having amino acid modifications to less bulky amino acids at positions Thr366, Leu368, and Tyr407, e.g., Ser, Ala and Val, respectively (T366S/L368A/Y407V). Heterodimerization via CH3 modifications can be further stabilized by the introduction of a disulfide bond, for example by changing Ser354 to Cys (S354C) and Y349 to Cys (Y349C) on opposite CH3 domains (see, Carter (2001) J. IMMUNOL. METHODS 248: 7-15).

[0176] In certain embodiments, the constant region of the light chain of the antibody is a human kappa constant region, e.g., a human kappa constant region having the amino acid sequence:

(SEQ ID NO: 231)
TVAAPSVFIFPPSDEQLKSGTASVVCLLNNFYPREAKVQWKVDNALQSGN
SQESVTEQDSKDSTYSLSSTLTLSKADYEKHKVYACEVTHQGLSSPVTKS
FNRGEC,

[0177] In certain embodiments, the constant region of the light chain of the antibody is a human kappa constant region, e.g., a human kappa constant region having the amino acid sequence:

(SEQ ID NO: 232)
RTVAAPSVFIFPPSDEQLKSGTASVVCLLNNFYPREAKVQWKVDNALQSG
NSQESVTEQDSKDSTYSLSSTLTLSKADYEKHKVYACEVTHQGLSSPVTK
SFNRGEC

[0178] In certain embodiments, the constant region of the light chain of the antibody is a human lambda constant region, e.g., a human lambda constant region having the amino acid sequence:

(SEQ ID NO: 233)
GQPKANPTVTLFPPSSEELQANKATLVCLISDFYPGAVTVAWKADGSPVK
AGVETTKPSKQSNNKYAASSYLSLTPEQWKSHRSYSCQVTHEGSTVEKTV
APTEC

[0179] In certain embodiments, the antibody comprises an immunoglobulin heavy chain comprising the amino acid sequence of SEQ ID NO: 235, or an amino acid sequence that has at least 85%, 90%, 95%, 95.5%, 96%, 96.5%, 97%, 98%, or 99% sequence identity to SEQ ID NO: 235; and/or an immunoglobulin light chain comprising the amino acid sequence of SEQ ID NO: 205, or an amino acid sequence that has at least 85%, 90%, 94.5% 95%, 95.5%, 96%, 97%, 98%, or 99% sequence identity to SEQ ID NO: 205.

[0180] In certain embodiments, the antibody binds human PD-L1 with a K_{D} of 20 nM, 15 nM, 10 nM, 9 nM, 8 nM, 7 nM, 6 nM, 5 nM, 4 nM, 3 nM, 2 nM, 1 nM, 0.75 nM, 0.5 nM, 0.1 nM, 0.075 nM, or 0.05 nM or lower, as measured using standard binding assays, for example, surface plasmon resonance or bio-layer interferometry. In certain embodiments, the antibody binds human PD-L1 with a K_{D} of from about 20 nM to about 0.05 nM, from about 20 nM to about 0.075 nM, from about 20 nM to about 0.1 nM, from about 20 nM to about 0.5 nM, from about 20 nM to about 1 nM, from about 10 nM to about 0.05 nM, from about 10 nM to about 0.075 nM, from about 10 nM to about 0.1 nM, from about 10 nM to about 0.5 nM, from about 10 nM to about 1 nM, from about 5 nM to about 0.05 nM, from about 5 nM to about 0.075 nM, from about 5 nM to about 0.1 nM, from about 5 nM to about 0.5 nM, from about 5 nM to about 1 nM, from about 3 nM to about 0.05 nM, from about 3 nM to about 0.075 nM, from about 3 nM to about 0.1 nM, from about 3 nM to about 0.5 nM, from about 3 nM to about 1 nM, from about 3 nM to about 2 nM, from about 2 nM to about 0.05 nM, from about 2 nM to about 0.075 nM, from about 2 nM to about 0.1 nM, from about 2 nM to about 0.5 nM, from about 2 nM to about 1 nM, from about 1 nM to about 0.05 nM, from about 1 nM to about 0.075 nM, from about 1 nM to about 0.1 nM, from about 1 nM to about 0.5 nM, from about 0.5 nM to about 0.05 nM, from about 0.5 nM to about 0.075 nM, from about 0.5 nM to about 0.1 nM, from about 0.1 nM to about 0.05 nM, from about 0.1 nM to about 0.075 nM, or from about 0.075 nM to about 0.05 nM, or from about 0.05 nM to about 0.035 nM, as measured using standard binding assays, for example, surface plasmon resonance or bio-layer interferometry.

[0181] In certain embodiments, in addition to binding human PD-L1, a disclosed antibody also binds to Macaca fascicularis (cynomolgus) PD-L1. For example, the antibody binds cynomolgus PD-L1 with a K_{D} of 20 nM, 15 nM, 10 nM, 9 nM, 8 nM, 7 nM, 6 nM, 5 nM, 4 nM, 3 nM, 2 nM, 1 nM, 0.75 nM, 0.5 nM, 0.1 nM, 0.075 nM, or 0.05 nM or lower, as measured using standard binding assays, for example, surface plasmon resonance or bio-layer interferometry. In certain embodiments, the antibody binds cynomolgus PD-L1 with a K_{D} of from about 20 nM to about 0.05 nM, from about 20 nM to about 0.075 nM, from about 20 nM to about 0.1 nM, from about 20 nM to about 0.5 nM, from about 20 nM to about 1 nM, from about 10 nM to about 0.05 nM, from about 10 nM to about 0.075 nM, from about 10 nM to about 0.1 nM, from about 10 nM to about 0.5 nM, from about 10 nM to about 1 nM, from about 5 nM to about 0.05 nM, from about 5 nM to about 0.075 nM, from about 5 nM to about 0.1 nM, from about 5 nM to about 0.5 nM, from about 5 nM to about 1 nM, from about 3 nM to about 0.05 nM, from about 3 nM to about 0.075 nM, from about 3 nM to about 0.1 nM, from about 3 nM to about 0.5 nM, from about 3 nM to about 1 nM, from about 3 nM to about 2 nM, from about 2 nM to about 0.05 nM, from about 2 nM to about 0.075 nM, from about 2 nM to about 0.1 nM, from about 2 nM to about 0.5 nM, from about 2 nM to about 1 nM, from about 1 nM to about 0.05 nM, from about 1 nM to about 0.075 nM, from about 1 nM to about 0.1 nM, from about 1 nM to about 0.5 nM, from about 0.5 nM to about 0.05 nM, from about 0.5 nM to about 0.075 nM, from about 0.5 nM to about 0.1 nM, from about 0.1 nM to about 0.05 nM, from about 0.1 nM to about 0.075 nM, or from about 0.075 nM to about 0.05 nM, as measured using standard binding assays, for example, surface plasmon resonance or bio-layer interferometry.

[0182] In certain embodiments, the antibody interferes with the binding of PD-L1 to PD-1.

[0183] In certain embodiments, the invention provides antibodies that bind to the same epitope present in PD-L1 as that bound by an antibody disclosed herein. In certain embodiments, the invention provides antibodies that compete for binding to PD-L1 with an antibody disclosed herein.

[0184] Competition assays for determining whether an antibody binds to the same epitope as, or competes for binding with a disclosed antibody are known in the art. Exemplary competition assays include immunoassays (e.g., ELISA assays, RIA assays), surface plasmon resonance, (e.g., BIAcore analysis), bio-layer interferometry, and flow cytometry.

[0185] Typically, a competition assay involves the use of an antigen (e.g., a human PD-L1 protein or fragment thereof) bound to a solid surface or expressed on a cell surface, a test PD-L1-binding antibody and a reference antibody. The reference antibody is labeled and the test antibody is unlabeled. Competitive inhibition is measured by determining the amount of labeled reference antibody bound to the solid surface or cells in the presence of the test antibody. Usually the test antibody is present in excess (e.g., 1×, 5×, 10×, 20× or 100×). Antibodies identified by competition assay (i.e., competing antibodies) include antibodies binding to the same epitope, or similar (e.g., overlapping) epitopes, as the reference antibody, and antibodies binding to an adjacent epitope sufficiently proximal to the epitope bound by the reference antibody for steric hindrance to occur.

[0186] A competition assay can be conducted in both directions to ensure that the presence of the label does not interfere or otherwise inhibit binding. For example, in the first direction the reference antibody is labeled and the test antibody is unlabeled, and in the second direction, the test antibody is labeled and the reference antibody is unlabeled.

[0187] A test antibody competes with the reference antibody for specific binding to the antigen if an excess of one antibody (e.g., 1×, 5×, 10×, 20× or 100×) inhibits binding of the other antibody, e.g., by at least 50%, 75%, 90%, 95% or 99% as measured in a competitive binding assay.

[0188] Two antibodies may be determined to bind to the same epitope if essentially all amino acid mutations in the antigen that reduce or eliminate binding of one antibody reduce or eliminate binding of the other. Two antibodies may be determined to bind to overlapping epitopes if only a subset of the amino acid mutations that reduce or eliminate binding of one antibody reduce or eliminate binding of the other.

[0189] In certain embodiments, the antibody (i) comprises an immunoglobulin heavy chain variable region comprising an amino acid sequence that is at least 70%, 75%, 80%, 85%, 86%, 87%, 88%, 89%, 89.5%, 90%, 90.5%, 91%, 92%, 93%, 94%, 95%, 96%, 97%, 98%, or 99% identical to SEQ ID NO: 164, and an immunoglobulin light chain variable region comprising an amino acid sequence that is at least 70%, 75%, 80%, 85%, 86%, 87%, 88%, 89%, 90%, 91%, 92%, 93%, 94%, 94.5%, 95%, 95.5%, 96%, 97%, 98%, or 99% identical to SEQ ID NO: 167, and (ii) competes for binding to human PD-L1 with and/or binds to same epitope on human PD-L1 as an antibody comprising an immunoglobulin heavy chain variable region comprising the amino acid sequence of SEQ ID NO: 164, and an immunoglobulin light chain variable region comprising the amino acid sequence of SEQ ID NO: 167.

[0190] In certain embodiments, the antibody (i) comprises an immunoglobulin heavy chain variable region comprising an amino acid sequence that is at least 70%, 75%, 80%, 85%, 86%, 87%, 88%, 89%, 89.5%, 90%, 90.5%, 91%, 92%, 93%, 94%, 95%, 96%, 97%, 98%, or 99% identical to SEQ ID NO: 199, and an immunoglobulin light chain variable region comprising an amino acid sequence that is at least 70%, 75%, 80%, 85%, 86%, 87%, 88%, 89%, 90%, 91%, 92%, 93%, 94%, 94.5%, 95%, 95.5%, 96%, 97%, 98%, or 99% identical to SEQ ID NO: 200, and (ii) competes for binding to human PD-L1 with and/or binds to same epitope on human PD-L1 as an antibody comprising an immunoglobulin heavy chain variable region comprising the amino acid sequence of SEQ ID NO: 199, and an immunoglobulin light chain variable region comprising the amino acid sequence of SEQ ID NO: 200.

[0191] In certain embodiments, the antibody (i) comprises an immunoglobulin heavy chain variable region comprising an amino acid sequence that is at least 70%, 75%, 80%, 85%, 86%, 87%, 88%, 89%, 89.5%, 90%, 90.5%, 91%, 92%, 93%, 94%, 95%, 96%, 97%, 98%, or 99% identical to SEQ ID NO: 199, and an immunoglobulin light chain variable region comprising an amino acid sequence that is at least 70%, 75%, 80%, 85%, 86%, 87%, 88%, 89%, 90%, 91%, 92%, 93%, 94%, 94.5%, 95%, 95.5%, 96%, 97%, 98%, or 99%, and (ii) competes for binding to human PD-L1 with and/or binds to same epitope on human PD-L1 as an antibody comprising an immunoglobulin heavy chain variable region comprising the amino acid sequence of SEQ ID NO: 199, and an immunoglobulin light chain variable region comprising the amino acid sequence of SEQ ID NO: 201.

[0192] In certain embodiments, the antibody (i) comprises an immunoglobulin heavy chain variable region comprising an amino acid sequence that is at least 70%, 75%, 80%, 85%, 86%, 87%, 88%, 89%, 89.5%, 90%, 90.5%, 91%, 92%, 93%, 94%, 95%, 96%, 97%, 98%, or 99% identical to SEQ ID NO: 199, and an immunoglobulin light chain variable region comprising an amino acid sequence that is at least 70%, 75%, 80%, 85%, 86%, 87%, 88%, 89%, 90%, 91%, 92%, 93%, 94%, 94.5%, 95%, 95.5%, 96%, 97%, 98%, or 99% identical to SEQ ID NO: 202, and (ii) competes for binding to human PD-L1 with and/or binds to same epitope on human PD-L1 as an antibody comprising an immunoglobulin heavy chain variable region comprising the amino acid sequence of SEQ ID NO: 199, and an immunoglobulin light chain variable region comprising the amino acid sequence of SEQ ID NO: 202.

[0193] In certain embodiments, the antibody (i) comprises an immunoglobulin heavy chain variable region comprising an amino acid sequence that is at least 70%, 75%, 80%, 85%, 86%, 87%, 88%, 89%, 89.5%, 90%, 90.5%, 91%, 92%, 93%, 94%, 95%, 96%, 97%, 98%, or 99% identical to SEQ ID NO: 199, and an immunoglobulin light chain variable region comprising an amino acid sequence that is at least 70%, 75%, 80%, 85%, 86%, 87%, 88%, 89%, 90%, 91%, 92%, 93%, 94%, 94.5%, 95%, 95.5%, 96%, 97%, 98%, or 99% identical to SEQ ID NO: 204, and (ii) competes for binding to human PD-L1 with and/or binds to same epitope on human PD-L1 as an antibody comprising an immunoglobulin heavy chain variable region comprising the amino acid sequence of SEQ ID NO: 199, and an immunoglobulin light chain variable region comprising the amino acid sequence of SEQ ID NO: 204.

[0194] In certain embodiments, the antibody (i) comprises an immunoglobulin heavy chain variable region comprising an amino acid sequence that is at least 70%, 75%, 80%, 85%, 90%, 95%, 96%, 97%, 98%, or 99% identical to SEQ ID NO: 132, and an immunoglobulin light chain variable region comprising an amino acid sequence that is at least 70%, 75%, 80%, 85%, 90%, 95%, 96%, 97%, 98%, or 99% identical to SEQ ID NO: 136, and (ii) competes for binding to human PD-L1 with and/or binds to same epitope on human PD-L1 as an antibody comprising an immunoglobulin heavy chain variable region comprising the amino acid sequence of SEQ ID NO: 132, and an immunoglobulin light chain variable region comprising the amino acid sequence of SEQ ID NO: 136.

[0195] In certain embodiments, the antibody (i) comprises an immunoglobulin heavy chain variable region comprising an amino acid sequence that is at least 70%, 75%, 80%, 85%, 90%, 95%, 96%, 97%, 98%, or 99% identical to SEQ ID NO: 140, and an immunoglobulin light chain variable region comprising an amino acid sequence that is at least 70%, 75%, 80%, 85%, 90%, 95%, 96%, 97%, 98%, or 99% identical to SEQ ID NO: 144, and (ii) competes for binding to human PD-L1 with and/or binds to same epitope on human PD-L1 as an antibody comprising an immunoglobulin heavy chain variable region comprising the amino acid sequence of SEQ ID NO: 140, and an immunoglobulin light chain variable region comprising the amino acid sequence of SEQ ID NO: 144.

[0196] In certain embodiments, the antibody (i) comprises an immunoglobulin heavy chain variable region comprising an amino acid sequence that is at least 70%, 75%, 80%, 85%, 90%, 95%, 96%, 97%, 98%, or 99% identical to SEQ ID NO: 148, and an immunoglobulin light chain variable region comprising an amino acid sequence that is at least 70%, 75%, 80%, 85%, 90%, 95%, 96%, 97%, 98%, or 99% identical to SEQ ID NO: 152, and (ii) competes for binding to human PD-L1 with and/or binds to same epitope on human PD-L1 as an antibody comprising an immunoglobulin heavy chain variable region comprising the amino acid sequence of SEQ ID NO: 148, and an immunoglobulin light chain variable region comprising the amino acid sequence of SEQ ID NO: 152.

[0197] In certain embodiments, the antibody (i) comprises an immunoglobulin heavy chain variable region comprising an amino acid sequence that is at least 70%, 75%, 80%, 85%, 90%, 95%, 96%, 97%, 98%, or 99% identical to SEQ ID NO: 156, and an immunoglobulin light chain variable region comprising an amino acid sequence that is at least 70%, 75%, 80%, 85%, 90%, 95%, 96%, 97%, 98%, or 99% identical to SEQ ID NO: 160, and (ii) competes for binding to human PD-L1 with and/or binds to same epitope on human PD-L1 as an antibody comprising an immunoglobulin heavy chain variable region comprising the amino acid sequence of SEQ ID NO: 156, and an immunoglobulin light chain variable region comprising the amino acid sequence of SEQ ID NO: 160.

[0198] In certain embodiments, the antibody (i) comprises an immunoglobulin heavy chain variable region comprising an amino acid sequence that is at least 70%, 75%, 80%, 85%, 90%, 95%, 96%, 97%, 98%, or 99% identical to SEQ ID NO: 170, and an immunoglobulin light chain variable region comprising an amino acid sequence that is at least 70%, 75%, 80%, 85%, 90%, 95%, 96%, 97%, 98%, or 99% identical to SEQ ID NO: 174, and (ii) competes for binding to human PD-L1 with and/or binds to same epitope on human PD-L1 as an antibody comprising an immunoglobulin heavy chain variable region comprising the amino acid sequence of SEQ ID NO: 170, and an immunoglobulin light chain variable region comprising the amino acid sequence of SEQ ID NO: 174.

[0199] In certain embodiments, the antibody (i) comprises an immunoglobulin heavy chain variable region comprising an amino acid sequence that is at least 70%, 75%, 80%, 85%, 90%, 95%, 96%, 97%, 98%, or 99% identical to SEQ ID NO: 178, and an immunoglobulin light chain variable region comprising an amino acid sequence that is at least 70%, 75%, 80%, 85%, 90%, 95%, 96%, 97%, 98%, or 99% identical to SEQ ID NO: 182, and (ii) competes for binding to human PD-L1 with and/or binds to same epitope on human PD-L1 as an antibody comprising an immunoglobulin heavy chain variable region comprising the amino acid sequence of SEQ ID NO: 178, and an immunoglobulin light chain variable region comprising the amino acid sequence of SEQ ID NO: 182.

[0200] In certain embodiments, the antibody (i) comprises an immunoglobulin heavy chain variable region comprising an amino acid sequence that is at least 70%, 75%, 80%, 85%, 90%, 95%, 96%, 97%, 98%, or 99% identical to SEQ ID NO: 186, and an immunoglobulin light chain variable region comprising an amino acid sequence that is at least 70%, 75%, 80%, 85%, 90%, 95%, 96%, 97%, 98%, or 99% identical to SEQ ID NO: 190, and (ii) competes for binding to human PD-L1 with and/or binds to same epitope on human PD-L1 as an antibody comprising an immunoglobulin heavy chain variable region comprising the amino acid sequence of SEQ ID NO: 186, and an immunoglobulin light chain variable region comprising the amino acid sequence of SEQ ID NO: 190.

[0201] In certain embodiments, the antibody (i) comprises an immunoglobulin heavy chain variable region comprising an amino acid sequence that is at least 70%, 75%, 80%, 85%, 90%, 95%, 96%, 97%, 98%, or 99% identical to SEQ ID NO: 194, and an immunoglobulin light chain variable region comprising an amino acid sequence that is at least 70%, 75%, 80%, 85%, 90%, 95%, 96%, 97%, 98%, or 99% identical to SEQ ID NO: 198, and (ii) competes for binding to human PD-L1 with and/or binds to same epitope on human PD-L1 as an antibody comprising an immunoglobulin heavy chain variable region comprising the amino acid sequence of SEQ ID NO: 194, and an immunoglobulin light chain variable region comprising the amino acid sequence of SEQ ID NO: 198.

[0202] The antibodies disclosed herein may be further optimized (e.g., affinity-matured) to improve biochemical characteristics including affinity and/or specificity, improve biophysical properties including aggregation, stability, precipitation and/or non-specific interactions, and/or to reduce immunogenicity. Affinity-maturation procedures are within ordinary skill in the art. For example, diversity can be introduced into an immunoglobulin heavy chain and/or an immunoglobulin light chain by DNA shuffling, chain shuffling, CDR shuffling, random mutagenesis and/or site-specific mutagenesis.

[0203] In certain embodiments, isolated human antibodies contain one or more somatic mutations. In these cases, antibodies can be modified to a human germline sequence to optimize the antibody (i.e., a process referred to as germlining).

[0204] Generally, an optimized antibody has at least the same, or substantially the same, affinity for the antigen as the non-optimized (or parental) antibody from which it was derived. Preferably, an optimized antibody has a higher affinity for the antigen when compared to the parental antibody.

[0205] If the antibody is for use as a therapeutic, it can be conjugated to an effector agent such as a small molecule toxin or a radionuclide using standard in vitro conjugation chemistries. If the effector agent is a polypeptide, the antibody can be chemically conjugated to the effector or joined to the effector as a fusion protein. Construction of fusion proteins is within ordinary skill in the art.

[0206] The antibody can be conjugated to an effector moiety such as a small molecule toxin or a radionuclide using standard in vitro conjugation chemistries. If the effector moiety is a polypeptide, the antibody can be chemically conjugated to the effector or joined to the effector as a fusion protein. Construction of fusion proteins is within ordinary skill in the art.

### II. Sialidase Anti-PD-L1 Fusion Proteins

[0207] To promote the selective removal of sialic acids on cells, e.g., hypersialylated cancer cells such as PD-L1 expressing cancer cells, and/or in the tumor microenvironment, it may be helpful to target a sialidase as described herein to such a cell or to such a tumor microenvironment. Additionally, in order to promote the removal of sialic acid by a sialidase in a subject, it may be helpful to extend the plasma half-life of the sialidase in the subject. These can be achieved by including the sialidase in a fusion protein and/or antibody conjugate (e.g., a chemically conjugated conjugate).

[0208] Accordingly, the invention further provides fusion proteins comprising a sialidase enzyme, or a functional fragment thereof, and a portion or fragment of an anti-PD-L1 antibody, such as an immunoglobulin Fc domain (also referred to herein as an Fc domain), or an immunoglobulin antigen-binding domain (also referred to herein as an antigen-binding domain). In certain embodiments, the sialidase and anti-PD-L1 antibody or portion thereof (e.g., immunoglobulin Fc domain or antigen-binding domain) are linked by a peptide bond or an amino acid linker.

[0209] As used herein, unless otherwise indicated, the term “fusion protein” is understood to refer to a single polypeptide chain comprising amino acid sequences based upon two or more separate proteins or polypeptide chains, where the two amino acid sequences may be fused together directly or via an intervening linker sequence, e.g., via an intervening amino acid linker. A nucleotide sequence encoding such a fusion protein can, for example, be created using conventional recombinant DNA technologies.

[0210] In certain embodiments, a fusion protein comprises a tag, such as a Strep tag (e.g., a Strep II tag), a His tag (e.g., a 10× His tag), a myc tag, or a FLAG tag. The tag can be located on the C-terminus or the N-terminus of the fusion protein.

a. Sialidase Portion

[0211] As used herein, the term “sialidase” refers to any enzyme, or a functional fragment thereof, that cleaves a terminal sialic acid residue from a substrate, for example, a glycoprotein or a glycolipid. The term sialidase includes variants having one or more amino acid substitutions, deletions, or insertions relative to a wild-type sialidase sequence, and/or fusion proteins or conjugates including a sialidase. Sialidases are also called neuraminidases, and, unless indicated otherwise, the two terms are used interchangeably herein. As used herein, the term “functional fragment” of a sialidase refers to fragment of a full-length sialidase that retains, for example, at least 10%, at least 20%, at least 30%, at least 40%, at least 50%, at least 60%, at least 70%, at least 80%, at least 90%, at least 95%, or 100% of the enzymatic activity of the corresponding full-length, naturally occurring sialidase. Sialidase enzymatic activity may be assayed by any method known in the art, including, for example, by measuring the release of sialic acid from the fluorogenic substrate 4-methylumbelliferyl-N-acetylneuraminic acid (4MU-NeuAc). In certain embodiments, the functional fragment comprises at least 100, 150, 200, 250, 300, 310, 320, 330, 340, 350, 360, or 370 consecutive amino acids present in a full-length, naturally occurring sialidase.

[0212] In certain embodiments, a sialidase portion of a sialidase-anti-PD-L1 fusion protein is derived from a eukaryotic sialidase, e.g., a mammalian sialidase, e.g., a human or mouse sialidase.

[0213] Four sialidases are encoded in the human genome: Neu1, Neu2, Neu3 and Neu4. Human Neu1 is a lysosomal neuraminidase enzyme which functions in a complex with beta-galactosidase and cathepsin A. The amino acid sequence of human Neu1 is depicted in SEQ ID NO: 7, and a nucleotide sequence encoding human Neu1 is depicted in SEQ ID NO: 23.

[0214] Human Neu2 is a cytosolic sialidase enzyme. The amino acid sequence of human Neu2 is depicted in SEQ ID NO: 1, and a nucleotide sequence encoding human Neu2 is depicted in SEQ ID NO: 24. Unless stated otherwise, as used herein, wild-type human Neu2 refers to human Neu2 having the amino acid sequence of SEQ ID NO: 1.

[0215] Human Neu3 is a plasma membrane sialidase with an activity specific for gangliosides. Human Neu3 has two isoforms: isoform 1 and isoform 2. The amino acid sequence of human Neu3, isoform 1 is depicted in SEQ ID NO: 8, and a nucleotide sequence encoding human Neu3, isoform 1 is depicted in SEQ ID NO: 25. The amino acid sequence of human Neu3, isoform 2 is depicted in SEQ ID NO: 9, and a nucleotide sequence encoding human Neu3, isoform 2 is depicted in SEQ ID NO: 34.

[0216] Human Neu4 has two isoforms: isoform 1 is a peripheral membrane protein and isoform 2 localizes to the lysosome lumen. The amino acid sequence of human Neu4, isoform 1 is depicted in SEQ ID NO: 10, and a nucleotide sequence encoding human Neu4, isoform 1 is depicted in SEQ ID NO: 26. The amino acid sequence of human Neu4, isoform 2 is depicted in SEQ ID NO: 11, and a nucleotide sequence encoding human Neu4, isoform 2 is depicted in SEQ ID NO: 35.

[0217] Four sialidases have also been found in the mouse genome and are referred to as Neu1, Neu2, Neu3 and Neu4. The amino acid sequence of mouse Neu1 is depicted in SEQ ID NO: 38, and a nucleotide sequence encoding mouse Neu1 is depicted in SEQ ID NO: 42. The amino acid sequence of mouse Neu2 is depicted in SEQ ID NO: 39 and a nucleotide sequence encoding mouse Neu2 is depicted in SEQ ID NO: 43. The amino acid sequence of mouse Neu3 is depicted in SEQ ID NO: 40, and a nucleotide sequence encoding mouse Neu3 is depicted in SEQ ID NO: 44. The amino acid sequence of mouse Neu4 is depicted in SEQ ID NO: 41, and a nucleotide sequence encoding mouse Neu4 is depicted in SEQ ID NO: 45.

[0218] In certain embodiments, a sialidase portion of a sialidase-anti-PD-L1 fusion protein is derived from a prokaryotic sialidase. Exemplary prokaryotic sialidases include sialidases from Salmonella typhimurium and Vibrio cholera. The amino acid sequence of Salmonella typhimurium sialidase (St-sialidase) is depicted in SEQ ID NO: 30, and a nucleotide sequence encoding Salmonella typhimurium sialidase is depicted in SEQ ID NO: 6. The amino acid sequence of Vibrio cholera sialidase is depicted in SEQ ID NO: 36, and a nucleotide sequence encoding Vibrio cholera sialidase is depicted in SEQ ID NO: 37.

[0219] In certain embodiments, the sialidase portion of a sialidase-anti-PD-L1 fusion protein is a mutant sialidase, e.g., a recombinant mutant human sialidase. In certain embodiments, the recombinant mutant human sialidase has about 5%, about 10%, about 15%, about 20%, about 25%, about 30%, about 35%, about 40%, about 45%, about 50%, about 55%, about 60%, about 65%, about 70%, about 75%, about 80%, about 85%, about 90%, about 95%, about 100%, or more than 100% of the enzymatic activity of a corresponding (or template) wild-type human sialidase.

[0220] In certain embodiments, the recombinant mutant human sialidase has the same substrate specificity as the corresponding wild-type human sialidase. In other embodiments, the recombinant mutant human sialidase has a different substrate specificity than the corresponding wild-type human sialidase. For example, in certain embodiments the recombinant mutant human sialidase can cleave α2,3, α2,6, and/or α2,8 linkages. In certain embodiments the sialidase can cleave α2,3 and α2,8 linkages.

[0221] In certain embodiments, the expression yield of the recombinant mutant human sialidase in mammalian cells, e.g., HEK293 cells, CHO cells, murine myeloma cells (NS0, Sp2/0), or human fibrosarcoma cells (HT-1080), e.g., HEK293 cells, is greater than about 10%, about 20%, about 50%, about 75%, about 100%, about 150%, about 200%, about 250%, about 300%, about 400%, about 500%, about 600%, about 700%, about 800%, about 900%, or about 1,000% of the expression yield of the corresponding wild-type human sialidase.

[0222] In certain embodiments, the recombinant mutant human sialidase has about 5%, about 10%, about 15%, about 20%, about 25%, about 30%, about 35%, about 40%, about 45%, about 50%, about 55%, about 60%, about 65%, about 70%, about 75%, about 80%, about 85%, about 90%, about 95%, about 100%, or more than 100% of the enzymatic activity of a corresponding wild-type human sialidase, and the expression yield of the recombinant mutant human sialidase in mammalian cells, e.g., HEK293 cells, is greater than about 10%, about 20%, about 50%, about 75%, about 100%, about 150%, about 200%, about 250%, about 300%, about 400%, about 500%, about 600%, about 700%, about 800%, about 900%, or about 1,000% of the expression yield of a corresponding wild-type human sialidase.

[0223] In certain embodiments, the amino acid sequence of the recombinant mutant human sialidase has at least 50%, 55%, 60%, 65%, 70%, 75%, 80%, 85%, 90%, 95%, 96%, 97%, 98%, or 99% sequence identity to the amino acid sequence of a corresponding wild-type human sialidase.

[0224] 1. Substitution of Cysteine Residues

[0225] In certain embodiments, the recombinant mutant human sialidase comprises a substitution of at least one cysteine (cys, C) residue. It has been discovered that certain cysteine residues in sialidases may inhibit expression of functional protein as a result of protein aggregation. Accordingly, in certain embodiments, the recombinant mutant human sialidase contains at least one mutation to remove a free cysteine (e.g., for Neu1 (SEQ ID NO: 7), a mutation of, for example, one or more of C111, C117, C171, C183, C218, C240, C242, and C252; for Neu2 (SEQ ID NO: 1), a mutation of, for example, one or more of C125, C196, C219, C272, C332, and C352; for Neu3 (SEQ ID NO: 8), a mutation of, for example, one or more of C7, C90, C99, C106, C127, C136, C189, C194, C226, C242, C250, C273, C279, C295, C356, C365, C368, C384, C383, C394, and C415; and for Neu4 (SEQ ID NO: 10), a mutation of, for example, one or more of C88, C125, C126, C186, C191, C211, C223, C239, C276, C437, C453, C480, and C481). Free cysteines can be substituted with any amino acid. In certain embodiments, the free cysteine is substituted with serine (ser, S), isoleucine (iso, I), valine (val, V), phenylalanine (phe, F), leucine (leu, L), or alanine (ala, A). Exemplary cysteine substitutions in Neu2 include C125A, C125I, C125S, C125V, C196A, C196L, C196V, C272S, C272V, C332A, C332S, C332V, C352L, and C352V.

[0226] In certain embodiments, the recombinant mutant human sialidase comprises two or more cysteine substitutions. Exemplary double or triple cysteine substitutions in Neu2 include: C125S and C332S; C272V and C332A; C272V and C332S; C332A and C352L; C125S and C196L; C196L and C352L; C196L and C332A; C332A and C352L; and C196L, C332A and C352L.

[0227] In certain embodiments, the recombinant mutant human sialidase is a Neu2 sialidase and comprises the substitutions C322A and C352L.

[0228] In certain embodiments, the sialidase contains an amino acid substitution at 2, 3, 4, 5, or 6 cysteines typically present in a human sialidase, e.g., Neu2 or Neu3.

[0229] In certain embodiments, the recombinant mutant human sialidase comprises a substitution or combination of substitutions corresponding to a substitution or combination of substitutions listed in TABLE 1 (amino acid positions corresponding to wild-type human Neu2 (SEQ ID NO: 1)).

TABLE 1
Substitution(s)
C125A
C125I
C125S
C125V
C196A
C196L
C196V
C272S
C272V
C332A
C332S
C332V
C352L
C352V
C125S + C332S
C272V + C332A
C272V + C332S
C332A + C352L
C125S + C196L
C196L + C352L
C196L + C332A
C196L + C332A + C352L

[0230] 2. Substitutions of Residues to Increase pI and/or Decrease Hydrophobicity

[0231] The isoelectric point (pI) of a protein is the pH at which the net charge is zero. The pI also generally indicates the pH at which the protein is least soluble, which may affect the ability to express and purify the protein. Generally, a protein has good solubility if its pI is greater than 2 units above the pH of the solution. Human Neu2 has a predicted pI of 7.5. Thus, human Neu2 is least soluble around neutral pH, which is undesirable because expression and physiological systems are at neutral pH. In contrast, the sialidase from Salmonella typhimurium (St-sialidase), which exhibits good solubility and recombinant expression, has a pI of 9.6. Accordingly, to increase expression of human Neu2 or the other human sialidases, a recombinant mutant human sialidase may be designed to contain one or more amino acid substitution(s) wherein the substitution(s) increase(s) the pI of the sialidase relative to a sialidase without the substitution. Additionally, decreasing the number of hydrophobic amino acids on the surface of a sialidase may improve expression of sialidase by, for example, reducing aggregation. Accordingly, to increase expression of human Neu2 or the other human sialidases, a recombinant mutant human sialidase may be designed to contain one or more amino acid substitution(s) wherein the substitution(s) decrease(s) the hydrophobicity of a surface of the sialidase relative to a sialidase without the substitution(s).

[0232] Accordingly, in certain embodiments, the recombinant mutant human sialidase comprises at least one amino acid substitution, wherein the substitution increases the isoelectric point (pI) of the sialidase and/or decreases the hydrophobicity of the sialidase relative to a sialidase without the substitution. This may be achieved by introducing one or more charged amino acids, for example, positively or negatively charged amino acids, into the recombinant sialidase. In certain embodiments, the amino acid substitution is to a charged amino acid, for example, a positively charged amino acid such as lysine (lys, K), histidine (his, H), or arginine (arg, R), or a negatively charged amino acid such as aspartic acid (asp, D) or glutamic acid (glu, E). In certain embodiments, the amino acid substitution is to a lysine residue. In certain embodiments, the substitution increases the pI of the sialidase to about 7.75, about 8, about 8.25, about 8.5, about 8.75, about 9, about 9.25, about 9.5, or about 9.75.

[0233] In certain embodiments, the amino acid substitution occurs at a surface exposed D or E amino acid, in a helix or loop, or in a position that has a K or R in the corresponding position of St-sialidase. In certain embodiments, the amino acid substitution occurs at an amino acid that is remote from the catalytic site or otherwise not involved in catalysis, an amino acid that is not conserved with the other human Neu proteins or with St-Sialidase or Clostridium NanH, or an amino acid that is not located in a domain important for function (e.g., an Asp-box or beta strand).

[0234] Exemplary amino acid substitutions in Neu2 that increase the isoelectric point (pI) of the sialidase and/or decrease the hydrophobicity of the sialidase relative to a sialidase without the substitution include A2E, A2K, D215K, V325E, V325K, E257K, and E319K. In certain embodiments, the recombinant mutant human sialidase comprises two or more amino acid substitutions, including, for example, A2K and V325E, A2K and V325K, E257K and V325K, A2K and E257K, and E257K and A2K and V325K.

[0235] In certain embodiments, the recombinant mutant human sialidase comprises a substitution or combination of substitutions corresponding to a substitution or combination of substitutions listed in TABLE 2 (amino acid positions corresponding to wild-type human Neu2 (SEQ ID NO: 1)).

TABLE 2
Substitution(s)
A2K
E72K
D215K
E257K
V325K
A2K + E257K
A2K + V325E
A2K + V325K
E257K + V325K

[0236] 3. Addition of N-Terminal Peptides and N- or C-Terminal Substitutions

[0237] It has been discovered that the addition of a peptide sequence of two or more amino acids to the N-terminus of a human sialidase can improve expression and/or activity of the sialidase. In certain embodiments, the peptide is at least 2 amino acids in length, for example, from 2 to 20, from 2 to 10, from 2 to 5, or 2, 3, 4, 5, 6, 7, 8, 9, 10, 11, 12, 13, 14, 15, 16, 17, 18, 19, or 20 amino acids in length. In certain embodiments, the peptide may form, or have a propensity to form, an α-helix.

[0238] In mice, a Neu2 isoform (type B) found in thymus contains six amino acids not present in the canonical isoform of Neu2 found in skeletal muscle. In certain embodiments herein, the N-terminal six amino acids of the mouse thymus Neu2 isoform, MEDLRP (SEQ ID NO: 4), or variations thereof, can be added onto a human Neu, e.g., human Neu2. In certain embodiments, the recombinant mutant human sialidase comprises a peptide at least two amino acid residues in length covalently associated with an N-terminal amino acid of the sialidase. In certain embodiments the recombinant mutant human sialidase comprises the peptide MEDLRP (SEQ ID NO: 4) or EDLRP (SEQ ID NO: 3) covalently associated with an N-terminal amino acid of the sialidase. In certain embodiments, the sialidase may further comprise a cleavage site, e.g., a proteolytic cleavage site, located between the peptide, e.g., MEDLRP (SEQ ID NO: 4) or EDLRP (SEQ ID NO: 3), and the remainder of the sialidase. In certain embodiments, the peptide, e.g., MEDLRP (SEQ ID NO: 4) or EDLRP (SEQ ID NO: 3), may be post-translationally cleaved from the remainder of the sialidase.

[0239] Alternatively to, or in combination with, the N-terminal addition, 1-5 amino acids of the 12 amino acid N-terminal region of the recombinant mutant human sialidase may be removed, e.g., the N-terminal methionine can be removed. In certain embodiments, if the recombinant mutant human sialidase is Neu2, the N-terminal methionine can be removed, the first five amino acids (MASLP; SEQ ID NO: 12) can be removed, or the second through fourth amino acids (ASLP; SEQ ID NO: 13) can be removed.

[0240] In certain embodiments, 1-5 amino acids of the 12 amino acid N-terminal region of the recombinant mutant human sialidase are substituted with MEDLRP (SEQ ID NO: 4), EDLRP (SEQ ID NO: 3), or TVEKSVVF (SEQ ID NO: 14). For example, in certain embodiments, if the recombinant mutant human sialidase is Neu2, the amino acids MASLP (SEQ ID NO: 12), ASLP (SEQ ID NO: 13) or M are substituted with MEDLRP (SEQ ID NO: 4), EDLRP (SEQ ID NO: 3) or TVEKSVVF (SEQ ID NO: 14).

[0241] Human sialidases have a β-propeller structure, characterized by 6 blade-shaped β-sheets arranged toroidally around a central axis. Generally, hydrophobic interactions between the blades of a β-propeller, including between the N- and C-terminal blades, enhance stability. Accordingly, in order to increase expression of human Neu2 or the other human sialidases, a recombinant mutant human sialidase can be designed comprising an amino acid substitution that increases hydrophobic interactions and/or hydrogen bonding between the N- and C-terminal β-propeller blades of the sialidase.

[0242] Accordingly, in certain embodiments, the recombinant mutant human sialidase comprises a substitution of at least one wild-type amino acid residue, wherein the substitution increases hydrophobic interactions and/or hydrogen bonding between the N- and C-termini of the sialidase relative to a sialidase without the substitution. In certain embodiments, the wild-type amino acid is substituted with asparagine (asn, N), lysine (lys, K), tyrosine (tyr, Y), phenylalanine (phe, F), or tryptophan (trp, W). Exemplary substitutions in Neu2 that increase hydrophobic interactions and/or hydrogen bonding between the N- and C-termini include L4N, L4K, V6Y, L7N, L4N and L7N, L4N and V6Y and L7N, V12N, V12Y, V12L, V6Y, V6F, or V6W. In certain embodiments, the sialidase comprises the V6Y substitution.

[0243] In certain embodiments, the recombinant mutant human sialidase comprises a combination of the above substitutions. For example, a recombinant mutant human Neu2 sialidase can comprise the additional amino acids MEDLRP (SEQ ID NO: 4), EDLRP (SEQ ID NO: 3), or TVEKSVVF (SEQ ID NO: 14) at the N-terminus and, in combination, can comprise at least one L4N, L4K, V6Y, L7N, L4N and L7N, L4N and V6Y and L7N, V12N, V12Y, V12L, V6Y, V6F, or V6W substitution. In certain embodiments, the amino acids MASLP (SEQ ID NO: 12), ASLP (SEQ ID NO: 13) or M of a recombinant mutant human Neu2 sialidase are replaced with MEDLRP (SEQ ID NO: 4), EDLRP (SEQ ID NO: 3) or TVEKSVVF (SEQ ID NO: 14) and the recombinant mutant human Neu2 sialidase also comprises at least one L4N, L4K, V6Y, L7N, L4N and L7N, L4N and V6Y and L7N, V12N, V12Y, V12L, V6Y, V6F, or V6W substitution.

[0244] In certain embodiments, the recombinant mutant human sialidase comprises a mutation or combination of mutations corresponding to a mutation or combination of mutations listed in TABLE 3 (amino acid positions corresponding to wild-type human Neu2 (SEQ ID NO: 1)).

TABLE 3
Mutation(s)
Substitute M at the N-terminus with EDLRP (SEQ ID NO: 3)
Substitute M at the N-terminus with MEDLRP (SEQ ID NO: 4)
Insert MEDLRP (SEQ ID NO: 4) at the N-terminus
Substitute MASLP (SEQ ID NO: 12) at the N-terminus with
MEDLRP (SEQ ID NO: 4)
L4N
V6Y
L7N
V6F
V6W

[0245] Additionally, in certain embodiments, the sialidase comprises a substitution or deletion of an N-terminal methionine at the N-terminus of the sialidase. For example, in certain embodiments, the sialidase comprises a substitution of a methionine residue at a position corresponding to position 1 of wild-type human Neu2 (SEQ ID NO: 1), e.g., the methionine at a position corresponding to position 1 of wild-type human Neu2 is substituted by alanine (M1A) or aspartic acid (M1D). In other embodiments, the sialidase comprises a deletion of a methionine residue at a position corresponding to position 1 (ΔM1) of wild-type human Neu2 (SEQ ID NO: 1).

[0246] In certain embodiments, the recombinant mutant human sialidase comprises a substitution or combination of substitutions corresponding to a substitution or combination of substitutions listed in TABLE 4 (amino acid positions corresponding to wild-type human Neu2 (SEQ ID NO: 1)).

TABLE 4
Mutation(s)
Deletion of M1, V6Y, I187K
M1R, V6Y, I187K
M1H, V6Y, I187K
M1K, V6Y, I187K
M1D, V6Y, I187K
M1T, V6Y, I187K
M1N, V6Y, I187K
M1Q, V6Y, I187K
M1G, V6Y, I187K
M1A, V6Y, I187K
M1V, V6Y, I187K
M1L, V6Y, I187K
M1F, V6Y, I187K
M1Y, V6Y, I187K

[0247] 4. Substitutions of Residues to Decrease Proteolytic Cleavage

[0248] It has been discovered that certain sialidases (e.g., human Neu2) are susceptible to cleavage by a protease (e.g., trypsin). As a result, proteolytic cleavage of the sialidase may occur during recombinant protein production, harvesting, purification, or formulation, during administration to a subject, or after administration to a subject. Accordingly, in certain embodiments, the recombinant mutant human sialidase comprises a substitution of at least one wild-type amino acid residue, wherein the substitution decreases cleavage of the sialidase by a protease (e.g., trypsin) relative to a sialidase without the substitution.

[0249] In certain embodiments, incubation of the recombinant mutant human sialidase with a protease (e.g., trypsin) results in from about 1% to about 50%, from about 1% to about 40%, from about 1%, to about 30%, from about 1% to about 20%, from about 1% to about 10%, from about 1% to about 5%, from about 5% to about 50%, from about 5% to about 40%, from about 5% to about 30%, from about 5% to about 20%, from about 5% to about 10%, from about 10% to about 50%, from about 10% to about 40%, from about 10% to about 30%, from about 10% to about 20%, from about 20% to about 50%, from about 20% to about 40%, from about 20% to about 30%, from about 30% to about 50%, from about 30% to about 40%, or from about 40% to about 50% of the proteolytic cleavage of a corresponding wild-type sialidase when incubated with the protease under the same conditions. In certain embodiments, incubation of the recombinant mutant human sialidase with a protease (e.g., trypsin) results in less than 50%, less than 40%, less than 30%, less than 10%, less than 5%, less than 3%, less than 1%, or less than 0.5% of the proteolytic cleavage of a corresponding wild-type sialidase when incubated with the protease under the same conditions. Proteolytic cleavage can be assayed by any method known in the art, including for example, by SDS-PAGE as described in Example 4 herein.

[0250] Exemplary substitutions that increase resistance to proteolytic cleavage include: (i) a substitution of an alanine residue at a position corresponding to position 242 of wild-type human Neu2 (SEQ ID NO: 1), e.g., a substitution by cysteine (A242C), phenylalanine (A242F), glycine (A242G), histidine (A242H), isoleucine (A242I), lysine (A242K), leucine (A242L), methionine (A242M), asparagine (A242N), glutamine (A242Q), arginine (A242R), serine (A242S), valine (A242V), tryptophan (A242W), or tyrosine (A242Y); (ii) a substitution of an arginine residue at a position corresponding to position 243 of wild-type human Neu2 (SEQ ID NO: 1), e.g., a substitution by glutamic acid (R243E), histidine (R243H), asparagine (R243N), glutamine (R243Q), or lysine (R243K); (iii) a substitution of a valine residue at a position corresponding to position 244 of wild-type human Neu2 (SEQ ID NO: 1), e.g., a substitution by isoleucine (V244I), lysine (V244K), or proline (V244P); or (iv) a combination of any of the foregoing. In certain embodiments, the recombinant mutant human sialidase comprises a substitution selected from A242C, A242F, A242Y, and A242W. In certain embodiments, the recombinant mutant human sialidase comprises a substitution or a combination of substitutions corresponding to a substitution or combination of substitutions listed in TABLE 5 (amino acid positions corresponding to wild-type human Neu2 (SEQ ID NO: 1)).

TABLE 5

| Wild Type | |
|---|---|
| Human Neu2 | |
| (SEQ ID NO: 1) | |
| Amino Acid | Exemplary Substitution(s) at Specified Position(s) |
| A242 | C, F, G, H, I, K, L, M, N, P, Q, R, S, V, W, Y |
| R243 | E, H, N, Q, K |
| V244 | I, K, P |

[0251] Additional exemplary substitutions that increase resistance to proteolytic cleavage (and/or increase expression yield and/or enzymatic activity) include: (i) a substitution of a leucine residue at a position corresponding to position 240 of wild-type human Neu2 (SEQ ID NO: 1), e.g., a substitution by aspartic acid (L240D), asparagine (L240N), or tyrosine (L240Y); (ii) a substitution of an alanine residue at a position corresponding to position 213 of wild-type human Neu2 (SEQ ID NO: 1), e.g., a substitution by cysteine (A213C), asparagine (A213N), serine (A213S), or threonine (A213T); (iii) a substitution of an arginine residue at a position corresponding to position 241 of wild-type human Neu2 (SEQ ID NO: 1), e.g., a substitution by alanine (R241A), aspartic acid (R241D), leucine (R241L), glutamine (R241Q), or tyrosine (R241Y); (iv) a substitution of a serine residue at a position corresponding to position 258 of wild-type human Neu2 (SEQ ID NO: 1), e.g., a substitution by cysteine (S258C); (v) a substitution of a leucine residue at a position corresponding to position 260 of wild-type human Neu2 (SEQ ID NO: 1), e.g., a substitution by aspartic acid (L260D), phenylalanine (L260F), glutamine (L260Q), or threonine (L260T); (vi) a substitution of a valine residue at a position corresponding to position 265 of wild-type human Neu2 (SEQ ID NO: 1), e.g., a substitution by phenylalanine (V265F); or (vii) a combination of any of the foregoing. It is contemplated that, in certain embodiments, a substitution or a combination of substitutions at these positions may improve hydrophobic and/or aromatic interaction between secondary structure elements in the sialidase (e.g., between an α-helix and the nearest (3-sheet) thereby stabilizing the structure and improving resistance to proteolytic cleavage.

[0252] In certain embodiments, the recombinant mutant sialidase comprises a mutation at position L240. In certain embodiments, the recombinant mutant sialidase comprises a combination of mutations at positions (i) A213 and A242, (ii) A213, A242, and S258, (iii) L240 and L260, (iv) R241 and A242, (v) A242 and L260, (vi) A242 and V265, or (vii) L240 and A242. In certain embodiments, the recombinant mutant human sialidase comprises a combination of substitutions selected from (i) A213C, A242F, and S258C, (ii) A213C and A242F, (iii) A213T and A242F, (iv) R241Y and A242F, and (v) L240Y and A242F. In certain embodiments, the recombinant mutant human sialidase comprises a substitution or combination of substitutions corresponding to a substitution or combination of substitutions listed in TABLE 6 (amino acid positions corresponding to wild-type human Neu2 (SEQ ID NO: 1)).

TABLE 6
Substitution(s)
A242C, V244P
A242R, V244R
A242R, V244H
A242Y, V244P
A242T, V244P
A242N, V244P
A213C, A242F
A213S, A242F
A213T, A242F
A213N, A242F
A213C, A242F, S258C
A242F, L260F
A242F, V265F
L240Y
L240Y, L260F
L240D, L260T
L240N, L260T
L240N, L260D
L240N, L260Q
L240Y, A242F
R241A, A242F
R241Y, A242F

[0253] 5. Other Substitutions

[0254] In certain embodiments, the recombinant mutant human sialidase comprises at least one of the following substitutions: I187K, A328E, K370N, or H210N. In certain embodiments, a recombinant mutant human Neu2 comprises the substitution of the amino acids GDYDAPTHQVQW (SEQ ID NO: 15) with the amino acids SMDQGSTW (SEQ ID NO: 16) or STDGGKTW (SEQ ID NO: 17). In certain embodiments, a recombinant mutant human Neu2 comprises the substitution of the amino acids PRPPAPEA (SEQ ID NO: 18) with the amino acids QTPLEAAC (SEQ ID NO: 19). In certain embodiments, a recombinant mutant human Neu2 comprises the substitution of the amino acids NPRPPAPEA (SEQ ID NO: 20) with the amino acids SQNDGES (SEQ ID NO: 21).

[0255] In certain embodiments, the recombinant mutant human sialidase comprises at least one substitution at a position corresponding to V212, A213, Q214, D215, T216, L217, E218, C219, Q220, V221, A222, E223, V224, E225, or T225.

[0256] In certain embodiments, the recombinant mutant human sialidase comprises an amino acid substitution at a position identified in TABLE 7 (amino acid positions corresponding to wild-type human Neu2 (SEQ ID NO: 1). In certain embodiments, the sialidase comprises an amino acid substitution identified in TABLE 7. In certain embodiments, the sialidase comprises a combination of any amino acid substitutions identified in TABLE 7.

TABLE 7

| Wild Type | |
|---|---|
| Human Neu2 | |
| (SEQ ID NO: 1) | |
| Amino Acid | Exemplary Substitution(s) at Specified Position(s) |
| M1 | D |
| L4 | S, T, Y, L, F, A, P, V, I, N, D, or H |
| P5 | G |
| V6 | Y |
| L7 | F, Y, S, I, T, or N |
| K9 | D |
| V12 | L, A, P, V, N, D, or H |
| F13 | S, N, R, K, T, G, D, E, or A |
| I22 | S, N, R, K, T, G, D, E, A, Y, L, F, P, V, I, or H |
| A24 | S, N, R, K, T, G, D, E, A, Y, L, F, P, V, I, or H |
| L34 | S, T, Y, L, F, A, P, V, I, N, D, or H |
| A36 | S, T, Y, L, F, A, P, V, I, N, D, or H |
| A42 | R or D |
| K44 | R or E |
| K45 | A, E, or R |
| L54 | M |
| P62 | H, G, N, T, S, F, I, D, or E |
| H64 | F, Y, S, I, T, or N |
| Q69 | H |
| R78 | K |
| D80 | P |
| P89 | S, T, Y, L, F, A, P, V, I, N, D, H, or M |
| A93 | E or K |
| G107 | D |
| Q108 | H |
| Q112 | R or K |
| C125 | Y, F, or L |
| Q126 | E, F, H, I, L, or Y |
| A150 | V |
| T156 | R, N, D, C, G, H, I, L, F, S, Y, V, A, P, or T |
| F157 | R, N, D, C, G, H, I, L, F, S, Y, V, A, or P |
| A158 | R, N, D, C, G, H, I, L, F, S, Y, V, A, P, or T |
| V159 | R, N, D, C, G, H, I, L, F, S, Y, V, A, or P |
| G160 | R, N, D, C, G, H, I, L, F, S, Y, V, A, P, or T |
| P161 | R, N, D, C, G, H, I, L, F, S, Y, V, A, or P |
| G162 | R, N, D, C, G, H, I, L, F, S, Y, V, A, P, or T |
| H163 | R, N, D, C, G, H, I, L, F, S, Y, V, A, or P |
| C164 | R, N, D, C, G, H, I, L, F, S, Y, V, A, P, or T |
| L165 | R, N, D, C, G, H, I, L, F, S, Y, V, A, or P |
| R170 | P |
| A171 | G |
| V176 | R, N, D, C, G, H, I, L, F, S, Y, V, P, or A |
| P177 | S, T, Y, L, F, A, P, V, I, N, D, or H |
| A178 | S, T, Y, L, F, A, P, V, I, N, D, or H |
| L184 | S, N, R, K, T, G, D, E, A, F, H, I, L, P, V, or Y |
| H185 | S, N, R, K, T, G, D, E, or A |
| P186 | S, N, R, K, T, G, D, E, A, F, H, I, L, P, V, or Y |
| I187 | S, N, R, K, T, G, D, E, or A |
| Q188 | P, S, N, R, K, T, G, D, E, or A |
| R189 | P |
| P190 | F, M, A, D, G, H, N, P, R, S, or T |
| I191 | M, A, D, F, H, I, L, N, P, S, T, V, Y, E, G, K, or R |
| A194 | S, T, Y, L, F, A, P, V, I, N, D, or H |
| A213 | C, N, S, or T |
| L217 | R, N, D, C, G, H, I, L, F, S, Y, or V |
| C219 | R, N, D, C, G, H, I, L, F, S, Y, or V |
| A222 | D |
| E225 | P |
| H239 | P |
| L240 | D, N, or Y |
| R241 | A, D, L, Q, or Y |
| A242 | C, F, G, H, I, K, L, M, N, Q, R, S, V, W, or Y |
| V244 | I or P |
| T249 | A |
| D251 | G |
| E257 | P |
| S258 | C |
| L260 | D, F, Q, or T |
| V265 | F |
| Q270 | S, T, A, H, P, or F |
| G271 | S, N, R, K, T, G, D, E, or A |
| C272 | S, N, R, K, T, G, D, E, A, C, H, Y, F, H, L, P, or V |
| W292 | R |
| S301 | A, D, E, F, G, H, I, K, L, M, N, P, Q, T, V, W, Y, C, or R |
| W302 | A, D, E, F, G, H, I, L, M, N, P, Q, R, S, T, V, Y, or K |
| E319 | D |
| V325 | F, Y, S, I, T, N, A, D, H, L, P, or V |
| L326 | F, Y, S, I, T, N, A, D, H, L, P, or V |
| L327 | F, Y, S, I, T, N, A, D, H, L, P, or V |
| C332 | A, D, G, H, N, P, R, S, or T |
| Y359 | A or S |
| V363 | R, S, T, Y, L, F, A, P, V, I, N, D, or H |
| L365 | K, Q, F, Y, S, I, T, N, A, D, H, L, P, or V |

[0257] For example, in certain embodiments, the recombinant mutant human sialidase comprises: (a) a substitution of a proline residue at a position corresponding to position 5 of wild-type human Neu2 (P5); (b) a substitution of a lysine residue at a position corresponding to position 9 of wild-type human Neu2 (K9); (c) a substitution of an alanine residue at a position corresponding to position 42 of wild-type human Neu2 (A42); (d) a substitution of a lysine residue at a position corresponding to position 44 of wild-type human Neu2 (K44); (e) a substitution of a lysine residue at a position corresponding to position 45 of wild-type human Neu2 (K45); (f) a substitution of a leucine residue at a position corresponding to position 54 of wild-type human Neu2 (L54); (g) a substitution of a proline residue at a position corresponding to position 62 of wild-type human Neu2 (P62); (h) a substitution of a glutamine residue at a position corresponding to position 69 of wild-type human Neu2 (Q69); (i) a substitution of an arginine residue at a position corresponding to position 78 of wild-type human Neu2 (R78); (j) a substitution of an aspartic acid residue at a position corresponding to position 80 of wild-type human Neu2 (D80); (k) a substitution of an alanine residue at a position corresponding to position 93 of wild-type human Neu2 (A93); (1) a substitution of a glycine residue at a position corresponding to position 107 of wild-type human Neu2 (G107); (m) a substitution of a glutamine residue at a position corresponding to position 108 of wild-type human Neu2 (Q108); (n) a substitution of a glutamine residue at a position corresponding to position 112 of wild-type human Neu2 (Q112); (o) a substitution of a cysteine residue at a position corresponding to position 125 of wild-type human Neu2 (C125); (p) a substitution of a glutamine residue at a position corresponding to position 126 of wild-type human Neu2 (Q126); (q) a substitution of an alanine residue at a position corresponding to position 150 of wild-type human Neu2 (A150); (r) a substitution of a cysteine residue at a position corresponding to position 164 of wild-type human Neu2 (C164); (s) a substitution of an arginine residue at a position corresponding to position 170 of wild-type human Neu2 (R170); (t) a substitution of an alanine residue at a position corresponding to position 171 of wild-type human Neu2 (A171); (u) a substitution of a glutamine residue at a position corresponding to position 188 of wild-type human Neu2 (Q188); (v) a substitution of an arginine residue at a position corresponding to position 189 of wild-type human Neu2 (R189); (w) a substitution of an alanine residue at a position corresponding to position 213 of wild-type human Neu2 (A213); (x) a substitution of a leucine residue at a position corresponding to position 217 of wild-type human Neu2 (L217); (y) a substitution of a glutamic acid residue at a position corresponding to position 225 of wild-type human Neu2 (E225); (z) a substitution of a histidine residue at a position corresponding to position 239 of wild-type human Neu2 (H239); (aa) a substitution of a leucine residue at a position corresponding to position 240 of wild-type human Neu2 (L240); (bb) a substitution of an arginine residue at a position corresponding to position 241 of wild-type human Neu2 (R241); (cc) a substitution of an alanine residue at a position corresponding to position 242 of wild-type human Neu2 (A242); (dd) a substitution of a valine residue at a position corresponding to position 244 of wild-type human Neu2 (V244); (ee) a substitution of a threonine residue at a position corresponding to position 249 of wild-type human Neu2 (T249); (ff) a substitution of an aspartic acid residue at a position corresponding to position 251 of wild-type human Neu2 (D251); (gg) a substitution of a glutamic acid residue at a position corresponding to position 257 of wild-type human Neu2 (E257); (hh) a substitution of a serine residue at a position corresponding to position 258 of wild-type human Neu2 (S258); (ii) a substitution of a leucine residue at a position corresponding to position 260 of wild-type human Neu2 (L260); (jj) a substitution of a valine residue at a position corresponding to position 265 of wild-type human Neu2 (V265); (kk) a substitution of a glutamine residue at a position corresponding to position 270 of wild-type human Neu2 (Q270); (ll) a substitution of a tryptophan residue at a position corresponding to position 292 of wild-type human Neu2 (W292); (mm) a substitution of a serine residue at a position corresponding to position 301 of wild-type human Neu2 (S301); (nn) a substitution of a tryptophan residue at a position corresponding to position 302 of wild-type human Neu2 (W302); (oo) a substitution of a valine residue at a position corresponding to position 363 of wild-type human Neu2 (V363); or (pp) a substitution of a leucine residue at a position corresponding to position 365 of wild-type human Neu2 (L365); or a combination of any of the foregoing substitutions. For example, the sialidase may comprise a substitution of K9, A42, P62, A93, Q216, A242, Q270, 5301, W302, V363, or L365, or a combination of any of the foregoing substitutions.

[0258] In certain embodiments, in the sialidase: (a) the proline residue at a position corresponding to position 5 of wild-type human Neu2 is substituted by histidine (P5H); (b) the lysine residue at a position corresponding to position 9 of wild-type human Neu2 is substituted by aspartic acid (K9D); (c) the alanine residue at a position corresponding to position 42 of wild-type human Neu2 is substituted by arginine (A42R) or aspartic acid (A42D); (d) the lysine residue at a position corresponding to position 44 of wild-type human Neu2 is substituted by arginine (K44R) or glutamic acid (K44E); (e) the lysine residue at a position corresponding to position 45 of wild-type human Neu2 is substituted by alanine (K45A), arginine (K45R), or glutamic acid (K45E); (f) the leucine residue at a position corresponding to position 54 of wild-type human Neu2 is substituted by methionine (L54M); (g) the proline residue at a position corresponding to position 62 of wild-type human Neu2 is substituted by asparagine (P62N), aspartic acid (P62D), histidine (P62H), glutamic acid (P62E), glycine (P62G), serine (P62S), or threonine (P62T); (h) the glutamine residue at a position corresponding to position 69 of wild-type human Neu2 is substituted by histidine (Q69H); (i) the arginine residue at a position corresponding to position 78 of wild-type human Neu2 is substituted by lysine (R78K); (j) the aspartic acid residue at a position corresponding to position 80 of wild-type human Neu2 is substituted by proline (D80P); (k) the alanine residue at a position corresponding to position 93 of wild-type human Neu2 is substituted by glutamic acid (A93E) or lysine (A93K); (l) the glycine residue at a position corresponding to position 107 of wild-type human Neu2 is substituted by aspartic acid (G107D); (m) the glutamine residue at a position corresponding to position 108 of wild-type human Neu2 is substituted by histidine (Q108H); (n) the glutamine residue at a position corresponding to position 112 of wild-type human Neu2 is substituted by arginine (Q112R) or lysine (Q112K); (o) the cysteine residue at a position corresponding to position 125 of wild-type human Neu2 is substituted by leucine (C125L); (p) the glutamine residue at a position corresponding to position 126 of wild-type human Neu2 is substituted by leucine (Q126L), glutamic acid (Q126E), phenylalanine (Q126F), histidine (Q126H), isoleucine (Q126I), or tyrosine (Q126Y); (q) the alanine residue at a position corresponding to position 150 of wild-type human Neu2 is substituted by valine (A150V); (r) the cysteine residue at a position corresponding to position 164 of wild-type human Neu2 is substituted by glycine (C164G); (s) the arginine residue at a position corresponding to position 170 of wild-type human Neu2 is substituted by proline (R170P); (t) the alanine residue at a position corresponding to position 171 of wild-type human Neu2 is substituted by glycine (A171G); (u) the glutamine residue at a position corresponding to position 188 of wild-type human Neu2 is substituted by proline (Q188P); (v) the arginine residue at a position corresponding to position 189 of wild-type human Neu2 is substituted by proline (R189P); (w) the alanine residue at a position corresponding to position 213 of wild-type human Neu2 is substituted by cysteine (A213C), asparagine (A213N), serine (A213S), or threonine (A213T); (x) the leucine residue at a position corresponding to position 217 of wild-type human Neu2 is substituted by alanine (L217A) or valine (L217V); (y) the threonine residue at a position corresponding to position 249 of wild-type human Neu2 is substituted by alanine (T249A); (z) the aspartic acid residue at a position corresponding to position 251 of wild-type human Neu2 is substituted by glycine (D251G); (aa) the glutamic acid residue at a position corresponding to position 225 of wild-type human Neu2 is substituted by proline (E225P); (bb) the histidine residue at a position corresponding to position 239 of wild-type human Neu2 is substituted by proline (H239P); (cc) the leucine residue at a position corresponding to position 240 of wild-type human Neu2 is substituted by aspartic acid (L240D), asparagine (L240N), or tyrosine (L240Y); (dd) the arginine residue at a position corresponding to position 241 of wild-type human Neu2 is substituted by alanine (R241A), aspartic acid (R241D), leucine (R241L), glutamine (R241Q), or tyrosine (R241Y); (ee) the alanine residue at a position corresponding to position 242 of wild-type human Neu2 is substituted by cysteine (A242C), phenylalanine (A242F), glycine (A242G), histidine (A242H), isoleucine (A242I), lysine (A242K), leucine (A242L), methionine (A242M), asparagine (A242N), glutamine (A242Q), arginine (A242R), serine (A242S), valine (A242V), tryptophan (A242W), or tyrosine (A242Y); (ff) the valine residue at a position corresponding to position 244 of wild-type human Neu2 is substituted by isoleucine (V244I), lysine (V244K), or proline (V244P); (gg) the glutamic acid residue at a position corresponding to position 257 of wild-type human Neu2 is substituted by proline (E257P); (hh) the serine residue at a position corresponding to position 258 is substituted by cysteine (S258C); (ii) the leucine residue at a position corresponding to position 260 of wild-type human Neu2 is substituted by aspartic acid (L260D), phenylalanine (L260F), glutamine (L260Q), or threonine (L260T); (jj) the valine residue at a position corresponding to position 265 of wild-type human Neu2 is substituted by phenylalanine (V265F); (kk) the glutamine residue at a position corresponding to position 270 of wild-type human Neu2 is substituted by alanine (Q270A), histidine (Q270H), phenylalanine (Q270F), proline (Q270P), serine (Q270S), or threonine (Q270T); (ll) the tryptophan residue at a position corresponding to position 292 of wild-type human Neu2 is substituted by arginine (W292R); (mm) the serine residue at a position corresponding to position 301 of wild-type human Neu2 is substituted by alanine (S301A), aspartic acid (S301D), glutamic acid (S301E), phenylalanine (S301F), glycine (S301G), histidine (S301H), isoleucine (S301I), lysine (S301K), leucine (S301L), methionine (S301M), asparagine (S301N), proline (S301P), glutamine (S301Q), arginine (S301R), threonine (S301T), valine (S301V), tryptophan (S301W), or tyrosine (S301Y); (nn) the tryptophan residue at a position corresponding to position 302 of wild-type human Neu2 is substituted by alanine (W302A), aspartic acid (W302D), glutamic acid (W302E), phenylalanine (W302F), glycine (W302G), histidine (W302H), isoleucine (W3021), lysine (W302K), leucine (W302L), methionine (W302M), asparagine (W302N), proline (W302P), glutamine (W302Q), arginine (W302R), serine (W302S), threonine (W302T), valine (W302V), or tyrosine (W302Y); (oo) the valine residue at a position corresponding to position 363 of wild-type human Neu2 is substituted by arginine (V363R); or (pp) the leucine residue at a position corresponding to position 365 of wild-type human Neu2 is substituted by glutamine (L365Q), histidine (L365H), isoleucine (L365I), lysine (L365K) or serine (L365S); or the sialidase comprises a combination of any of the foregoing substitutions. For example, the sialidase may comprise a substitution selected from K9D, A42R, P62G, P62N, P62S, P62T, D80P, A93E, Q126H, Q126Y, R189P, H239P, A242T, Q270A, Q270S, Q270T, S301A, S301R, W302K, W302R, V363R, and L365I, or a combination of any of the foregoing substitutions.

[0259] In certain embodiments, the recombinant mutant human sialidase comprises a deletion of a leucine residue at a position corresponding to position 184 of wild-type human Neu2 (ΔL184), a deletion of a histidine residue at a position corresponding to position 185 of wild-type human Neu2 (ΔH185), a deletion of a proline residue at a position corresponding to position 186 of wild-type human Neu2 (ΔP186), a deletion of an isoleucine residue at a position corresponding to position 187 of wild-type human Neu2 (ΔI187), and a deletion of a glutamine residue at a position corresponding to position 184 of wild-type human Neu2 (ΔQ188), or a combination of any of the foregoing deletions.

[0260] In certain embodiments, the recombinant mutant human sialidase comprises an insertion between a threonine residue at a position corresponding to position 216 of wild-type human Neu2 and a leucine residue at a position corresponding to position 217 of wild-type human Neu2, for example, an insertion of an amino acid selected from S, T, Y, L, F, A, P, V, I, N, D, and H.

[0261] Additional exemplary sialidase mutations, and combinations of sialidase mutations, are described in International (PCT) Patent Application Publication No. WO 2019/136167, including in the Detailed Description in the section entitled “I. Recombinant Human Sialidases,” and in the Examples in Examples 1, 2, 3, 4, 5, and 6, and International (PCT) Patent Application Publication No. WO 2021/003469, including in the Detailed Description in the section entitled “I. Recombinant Human Sialidases,” and in the Examples in Examples 2, 3, 4, and 5, and in International (PCT) Patent Application No. PCT/US2021/040240, filed Jul. 2, 2021, including in the Detailed Description in the section entitled “I. Recombinant Human Sialidases,” and in the Examples in Examples 2, 3, 4, and 5.

[0262] 6. Combinations of Substitutions

[0263] In certain embodiments, the recombinant mutant human sialidase comprises a combination of any of the mutations contemplated herein. For example, the recombinant mutant sialidase enzyme may comprise a combination of 2, 3, 4, 5, 6, 7, 8, 9, 10, 11, 12, 13, 14, 15 or more of the mutations contemplated herein. It is contemplated that the recombinant mutant sialidase enzyme may comprise 1-15, 1-10, 1-7, 1-6, 1-5, 1-4, 1-3, 1-2, 2-15, 2-10, 2-7, 2-6, 2-5, 2-4, 2-3, 3-15, 3-10, 3-7, 3-6, 3-5, or 3-4 of the mutations contemplated herein.

[0264] For example, the recombinant mutant sialidase enzyme may comprise a M1 deletion (ΔM1), M1A substitution, M1D substitution, V6Y substitution, K9D substitution, P62G substitution, P62N substitution, P62S substitution, P62T substitution, A93E substitution, I187K substitution, Q270A substitution, S301R substitution, W302K substitution, C332A substitution, V363R substitution, L365I substitution, or a combination of any of the foregoing.

[0265] In certain embodiments, the recombinant mutant sialidase enzyme comprises a M1 deletion (ΔM1), M1A substitution, M1D substitution, V6Y substitution, I187K substitution, C332A substitution, or a combination of any of the foregoing. For example, the recombinant mutant sialidase enzyme may comprise a combination of mutations selected from: M1A and V6Y; M1A and I187K; M1A and C332A; M1D and V6Y; M1D and I187K; M1D and C332A; ΔM1 and V6Y; ΔM1 and I187K; ΔM1 and C332A; V6Y and I187K; V6Y and C332A; I187K and C332A; M1A, V6Y, and I187K; M1A, V6Y, and C332A; M1A, I187K, and C332A; M1D, V6Y, and I187K; M1D, V6Y, and C332A; M1D, I187K, and C332A; ΔM1, V6Y, and I187K; ΔM1, V6Y, and C332A; ΔM1, I187K, and C332A; V6Y, I187K, and C332A; M1A, V6Y, I187K, and C332A; M1D, V6Y, I187K, and C332A; and ΔM1, V6Y, I187K, and C332A.

[0266] In certain embodiments, the recombinant mutant sialidase enzyme comprises (i) an amino acid substitution identified in TABLE 7, or a combination of any amino acid substitutions identified in TABLE 7, and (ii) an M1 deletion (ΔM1), M1A substitution, M1D substitution, V6Y substitution, I187K substitution, C332A substitution, or a combination of any of the foregoing. For example, the recombinant mutant sialidase enzyme may comprise (i) an amino acid substitution identified in TABLE 7, or a combination of any amino acid substitutions identified in TABLE 7, and (ii) a combination of mutations selected from: M1A and V6Y; M1A and I187K; M1A and C332A; M1D and V6Y; M1D and I187K; M1D and C332A; ΔM1 and V6Y; ΔM1 and I187K; ΔM1 and C332A; V6Y and I187K; V6Y and C332A; I187K and C332A; M1A, V6Y, and I187K; M1A, V6Y, and C332A; M1A, I187K, and C332A; M1D, V6Y, and I187K; M1D, V6Y, and C332A; M1D, I187K, and C332A; ΔM1, V6Y, and I187K; ΔM1, V6Y, and C332A; ΔM1, I187K, and C332A; V6Y, I187K, and C332A; M1A, V6Y, I187K, and C332A; M1D, V6Y, I187K, and C332A; and ΔM1, V6Y, I187K, and C332A.

[0267] In certain embodiments, the recombinant mutant sialidase enzyme comprises: (a) the M1D, V6Y, P62G, A93E, I187K, and C332A substitutions; (b) the M1D, V6Y, K9D, A93E, I187K, C332A, V363R, and L365I substitutions; (c) the M1D, V6Y, P62N, I187K, and C332A substitutions; (d) the M1D, V6Y, I187K, Q270A, S301R, W302K, and C332A substitutions; (e) the M1D, V6Y, P62S, I187K, Q270A, S301R, W302K, and C332A substitutions; (f) the M1D, V6Y, P62T, I187K, Q270A, S301R, W302K, and C332A substitutions; (g) the M1D, V6Y, P62N, I187K, Q270A, S301R, W302K, and C332A substitutions; (h) the M1D, V6Y, P62G, A93E, I187K, S301A, W302R, and C332A substitutions; (i) the M1D, V6Y, P62G, A93E, Q126Y, I187K, Q270T, and C332A substitutions; (j) the M1D, V6Y, P62G, A93E, Q126Y, I187K, and C332A substitutions; (k) the M1D, V6Y, P62G, A93E, Q126Y, I187K, A242F, Q270T, and C332A substitutions; or (1) the M1D, V6Y, A42R, P62G, A93E, Q126Y, I187K, A242F, Q270T, and C332A mutations.

[0268] In certain embodiments, the recombinant mutant human sialidase comprises a substitution of a serine residue at a position corresponding to position 301 of wild-type human Neu2 (S301) in combination with a substitution of a tryptophan residue at a position corresponding to position 302 of wild-type human Neu2 (W302). For example, the recombinant mutant human sialidase may comprise a combination of substitutions corresponding to a combination of substitutions listed in a row of TABLE 8 (amino acid positions corresponding to wild-type human Neu2 (SEQ ID NO: 1)). For example, the recombinant mutant human sialidase may comprise: the S301K and W302R substitutions; the S301K and W302K substitutions; or the S301A and W302S substitutions.

TABLE 8
Substitutions
S301A, W302R
S301A, W302S
S301A, W302T
S301K, W302S
S301N, W302S
S301T, W302S
S301T, W302T
S301T, W302R
S301A, W302A
S301K, W302R
S301K, W302T
S301N, W302T
S301K, W302K
S301P, W302R
S301P, W302S
S301P, W302T

[0269] In certain embodiments, the recombinant mutant human sialidase comprises a combination of substitutions corresponding to a combination of substitutions listed in a row of TABLE 9 (amino acid positions corresponding to wild-type human Neu2 (SEQ ID NO: 1)).

TABLE 9
Substitutions
M1D, V6Y, P62G, I187K, C332A
M1D, V6Y, K9D, I187K, C332A, V363R, L365I
M1D, V6Y, P62G, A93E, I187K, C332A
M1D, V6Y, K9D, I187K, C332A, V363R, L365K
M1D, V6Y, K9D, I187K, C332A, V363R, L365S
M1D, V6Y, K9D, I187K, C332A, V363R, L365Q
M1D, V6Y, K9D, I187K, C332A, V363R, L365H
M1D, V6Y, A93K, I187K, C332A
M1D, V6Y, A93E, I187K, C332A
V6Y, I187K, W292R
V6Y, G107D, I187K
V6Y, C125L
C125L, I187K
V6Y, C125L, I187K
M1D, V6Y, K45A, I187K, C332A
M1D, V6Y, Q270A, I187K, C332A
M1D, V6Y, K44R, K45R, I187K, C332A
M1D, V6Y, Q112R, I187K, C332A
M1D, V6Y, Q270F, I187K, C332A
M1D, V6Y, I187K, S301R, W302K, C332A
M1D, V6Y, K44E, K45E, I187K, C332A
M1D, V6Y, I187K, L217V, C332A
M1D, V6Y, I187K, L217A, C332A
M1D, V6Y, K44E, K45E, I187K, S301R, W302K, C332A
M1D, V6Y, Q112R, I187K, S301R, W302K, C332A
M1D, V6Y, I187K, Q270A, S301R, W302K, C332A
M1D, V6Y, K44E, K45E, Q112R, I187K, C332A
M1D, V6Y, K44E, K45E, I187K, Q270A, C332A
M1D, V6Y, K45A, I187K, Q270A, C332A
M1D, V6Y, 1187K, Q270H, C332A
M1D, V6Y, I187K, Q270P, C332A
M1D, V6Y, Q112K, I187K, C332A
M1D, V6Y, P62S, I187K, Q270A, S301R, W302K, C332A
M1D, V6Y, P62T, I187K, Q270A, S301R, W302K, C332A
M1D, V6Y, P62N, I187K, Q270A, S301R, W302K, C332A
V6Y, P62H, I187K
V6Y, Q108H, I187K
M1D, V6Y, P62H, I187K, C332A
M1D, V6Y, P62G, I187K, C332A
V6Y, P62G, I187K
M1D, V6Y, P62H, I187K
M1D, V6Y, Q108H, I187K
M1D, V6Y, P62N, I187K, C332A
M1D, V6Y, P62D, I187K, C332A
M1D, V6Y, P62E, I187K, C332A
V6Y, C164G, I187K, T249A
V6Y, C164G, I187K
V6Y, Q126L, I187K D251G
V6Y, L54M, Q69H, R78K, A171G, I187K
V6Y, P62T, I187K
V6Y, A150V, I187K
P5H, V6Y, P62S, I187K
V6Y, C164G, I187K
Q126Y, Q170T
Q126Y, A242F, Q270T
M1D, V6Y, P62G, A93E, Q126E, I187K, C332A
M1D, V6Y, P62G, A93E, Q126I, I187K, C332A
M1D, V6Y, P62G, A93E, Q126L, I187K, C332A
M1D, V6Y, P62G, A93E, Q126Y, I187K, C332A
M1D, V6Y, P62G, A93E, Q126F, I187K, C332A
M1D, V6Y, P62G, A93E, Q126H, I187K, C332A
M1D, V6Y, P62G, A93E, I187K, Q270S, C332A
M1D, V6Y, P62G, A93E, I187K, Q270T, C332A
M1D, V6Y, P62G, A93E, Q126Y, I187K, Q270T, C332A
M1D, V6Y, P62G, A93E, Q126Y, I187K, A242F, Q270T, C332A
M1D, V6Y, P62G, D80P, A93E, I187K, C332A
M1D, V6Y, P62G, A93E, R170P, I187K, C332A
M1D, V6Y, P62G, A93E, I187K, Q188P, C332A
M1D, V6Y, P62G, A93E, I187K, R189P, C332A
M1D, V6Y, P62G, A93E, I187K, E225P, C332A
M1D, V6Y, P62G, A93E, I187K, H239P, C332A
M1D, V6Y, P62G, A93E, I187K, E257P, C332A
M1D, V6Y, P62G, A93E, I187K, S301A, C332A
M1D, V6Y, P62G, A93E, I187K, S301D, C332A
M1D, V6Y, P62G, A93E, I187K, S301E, C332A
M1D, V6Y, P62G, A93E, I187K, S301F, C332A
M1D, V6Y, P62G, A93E, 1187K, S301H, C332A
M1D, V6Y, P62G, A93E, I187K, S301K, C332A
M1D, V6Y, P62G, A93E, I187K, S301L, C332A
M1D, V6Y, P62G, A93E, I187K, S301M, C332A
M1D, V6Y, P62G, A93E, I187K, S301N, C332A
M1D, V6Y, P62G, A93E, I187K, S301P, C332A
M1D, V6Y, P62G, A93E, I187K, S301Q, C332A
M1D, V6Y, P62G, A93E, I187K, S301R, C332A
M1D, V6Y, P62G, A93E, I187K, S301T, C332A
M1D, V6Y, P62G, A93E, I187K, S301V, C332A
M1D, V6Y, P62G, A93E, I187K, S301W, C332A
M1D, V6Y, P62G, A93E, I187K, S301Y, C332A
M1D, V6Y, P62G, A93E, I187K, W302A, C332A
M1D, V6Y, P62G, A93E, I187K, W302D, C332A
M1D, V6Y, P62G, A93E, I187K, W302F, C332A
M1D, V6Y, P62G, A93E, I187K, W302G, C332A
M1D, V6Y, P62G, A93E, I187K, W302H, C332A
M1D, V6Y, P62G, A93E, I187K, W302I, C332A
M1D, V6Y, P62G, A93E, I187K, W302L, C332A
M1D, V6Y, P62G, A93E, I187K, W302M, C332A
M1D, V6Y, P62G, A93E, I187K, W302N, C332A
M1D, V6Y, P62G, A93E, I187K, W302P, C332A
M1D, V6Y, P62G, A93E, I187K, W302Q, C332A
M1D, V6Y, P62G, A93E, I187K, W302R, C332A
M1D, V6Y, P62G, A93E, I187K, W302S, C332A
M1D, V6Y, P62G, A93E, I187K, W302T, C332A
M1D, V6Y, P62G, A93E, I187K, W302V, C332A
M1D, V6Y, P62G, A93E, I187K, W302Y, C332A
M1D, V6Y, P62G, A93E, I187K, S301A, W302A, C332A
M1D, V6Y, P62G, A93E, I187K, S301A, W302R, C332A
M1D, V6Y, P62G, A93E, I187K, S301A, W302S, C332A
M1D, V6Y, P62G, A93E, I187K, S301A, W302T, C332A
M1D, V6Y, P62G, A93E, I187K, S301K, W302S, C332A
M1D, V6Y, P62G, A93E, I187K, S301K, W302R, C332A
M1D, V6Y, P62G, A93E, I187K, S301K, W302T, C332A
M1D, V6Y, P62G, A93E, I187K, S301N, W302S, C332A
M1D, V6Y, P62G, A93E, I187K, S301N, W302T, C332A
M1D, V6Y, P62G, A93E, I187K, S301T, W302R, C332A
Q126Y, Q270T
Q126Y, A242F, Q270T
M1D, V6Y, A42R, P62G, A93E, Q126Y, I187K, A242F, Q270T, and C332A

[0270] In certain embodiments, the recombinant mutant human sialidase comprises the amino acid sequence of any one of SEQ ID NOs: 48-62, 94, 97, 100, 126, or 234, or an amino acid sequence that has at least 85%, 90%, 95%, 96%, 97%, 98%, or 99% sequence identity to any one of SEQ ID NOs: 48-62, 94, 97, 100, 126, or 234.

[0271] In certain embodiments, the recombinant mutant human sialidase comprises the amino acid sequence of

(SEQ ID NO: 238)
X₁X₂SX₃X₄X₅LQX₆SVFQSGAHAYRIPALLYLPGQQSLLAFAEQRX₇S
X₈X₉DEHAELIVX₁₀RRGDYDAX₁₁THQVQWX₁₂AQEVVAQAX₁₃LX₁₄G
HRSMNPCPLYDX₁₅QTGTLFLFFIAIPX₁₆X₁₇VTEX₁₈QQLQTRANVTR
LX₁₉X₂₀VTSTDHGRTWSSPRDLTDAAIGPX₂₁YREWSTFAVGPGHX₂₂L
QLHDX₂₃X₂₄RSLVVPAYAYRKLHPX₂₅X₂₆X₂₇PIPSAFX₂₈FLSHDHG
RTWARGHFVX₂₉QDTX₃₀ECQVAEVX₃₁TGEQRVVTLNARSX₃₂X₃₃X₃₄
X₃₅RX₃₆QAQSX₃₇NX₃₈GLDFQX₃₉X₄₀QX₄₁VKKLX₄₂EPPPX₄₃G
X₄₄QGSVISFPSPRSGPGSPAQX₄₅LLYTHPTHX₄₆X₄₇QRADLGAYLNP
RPPAPEAWSEPX₄₈LLAKGSX₄₉AYSDLQSMGTGPDGSPLFGX₅₀LYEAN
DYEEIX₅₁FX₅₂MFTLKQAFPAEYLPQ,

wherein X₁ is Ala, Arg, Asn, Asp, Gln, Glu, Gly, His, Leu, Lys, Met, Phe, Thr, Val, or not present, X₂ is Ala or Lys, X₃ is Asn or Leu, X₄ is Pro or His, X₅ is Phe, Trp, Tyr or Val, X₆ is Lys or Asp, X₇ is Ala or Arg, X₈ is Lys, Arg, or Glu, X₉ is Lys, Ala, Arg, or Glu, X₁₀ is Leu or Met, X₁₁ is Pro, Asn, Asp, His, Glu, Gly, Ser or Thr, X₁₂ is Gln or His, X₁₃ is Arg or Lys, X₁₄ is Asp or Pro, X₁₅ is Ala, Glu or Lys, X₁₆ is Gly or Asp, X₁₇ is Gln or His, X₁₈ is Gln, Arg, or Lys, X₁₉ is Ala, Cys, Ile, Ser, Val, or Leu, X₂₀ is Gln, Leu, Glu, Phe, His, Ile, Leu, or Tyr, X₂₁ is Ala or Val, X₂₂ is Cys or Gly, X₂₃ is Arg or Pro, X₂₄ is Ala or Gly, X₂₅ is Arg, Ile, or Lys, X₂₆ is Gln or Pro, X₂₇ is Arg or Pro, X₂₈ is Ala, Cys, Leu, or Val, X₂₉ is Ala, Cys, Asn, Ser, or Thr, X₃₀ is Leu, Ala, or Val, X₃₁ is Glu or Pro, X₃₂ is His or Pro, X₃₃ is Leu, Asp, Asn, or Tyr, X₃₄ is Arg, Ala, Asp, Leu, Gln, or Tyr, X₃₅ is Ala, Cys, Phe, Gly, His, Ile, Lys, Leu, Met, Asn, Gln, Arg, Ser, Val, Trp, or Tyr, X₃₆ is Val, Ile, or Lys, X₃₇ is Thr or Ala, X₃₈ is Asp or Gly, X₃₉ is Glu, Lys, or Pro, X₄₀ is Ser or Cys, X₄₁ is Leu, Asp, Phe, Gln, or Thr, X₄₂ is Val or Phe, X₄₃ is Gln, Ala, His, Phe, Pro, Ser, or Thr, X₄₄ is Cys or Val, X₄₅ is Trp or Arg, X₄₆ is Ser, Arg, Ala, Asp, Glu, Phe, Gly, His, Ile, Lys, Leu, Met, Asn, Pro, Gln, Thr, Val, Trp, or Tyr, X₄₇ is Trp, Lys, Ala, Asp, Glu, Phe, Gly, His, Ile, Lys, Leu, Met, Asn, Pro, Gln, Arg, Ser, Thr, Val, or Tyr, X₄₈ is Lys or Val, X₄₉ is Ala, Cys, Ser, or Val, X₅₀ is Cys, Leu, or Val, X₅₁ is Val or Arg, and X₅₂ is Leu, Gln, His, Ile, Lys, or Ser, and the sialidase comprises at least one mutation relative to wild-type human Neu2 (SEQ ID NO: 1).

[0272] In certain embodiments, the recombinant mutant human sialidase comprises the amino acid sequence of

(SEQ ID NO: 239)
X₁ASLPX₂LQX₃ESVFQSGAHAYRIPALLYLPGQQSLLAFAEQRX₄SKKD
EHAELIVLRRGDYDAX₅THQVQWQAQEVVAQARLDGHRSMNPCPLYDX₆Q
TGTLFLFFIAIPGQVTEQQQLQTRANVTRLCX₇VTSTDHGRTWSSPRDLT
DAAIGPAYREWSTFAVGPGHCLQLHDRARSLVVPAYAYRKLHPX₈QRPIP
SAFCFLSHDHGRTWARGHEVAQDTLECQVAEVETGEQRVVTLNARSHLR
X₉RVQAQSTNDGLDFQESQLVKKLVEPPPX₁₀GCQGSVISFPSPRSGPGS
PAQWLLYTHPTHX₁₁X₁₂QRADLGAYLNPRPPAPEAWSEPVLLAKGSX₁₃
AYSDLQSMGTGPDGSPLFGCLYEANDYEEIX₁₄FX₁₅MFTLKQAFPAEYL
PQ,

wherein X₁ is Ala, Arg, Asn, Asp, Gln, Glu, Gly, His, Leu, Lys, Met, Phe, Thr, Val, or not present, X₂ is Phe, Trp, Tyr or Val, X₃ is Lys or Asp, X₄ is Arg or Ala, X₅ is Pro, Asn, Asp, His, Glu, Gly, Ser or Thr, X₆ is Ala, Glu, or Lys, X₇ is Gln, Leu, Glu, Phe, His, Ile, Leu, or Tyr, X₈ is Arg, Ile, or Lys, X₉ is Ala, Cys, Phe, Gly, His, Ile, Lys, Leu, Met, Asn, Gln, Arg, Ser, Val, Trp, or Tyr, X₁₀ is Gln, Ala, His, Phe, Pro, Ser, or Thr, X₁₁ is Ser, Arg, Ala, Asp, Glu, Phe, Gly, His, Ile, Lys, Leu, Met, Asn, Pro, Gln, Thr, Val, Trp, or Tyr, X₁₂ is Trp, Lys, Ala, Asp, Glu, Phe, Gly, His, Ile, Lys, Leu, Met, Asn, Pro, Gln, Arg, Ser, Thr, Val, or Tyr, X₁₃ is Ala, Cys, Ser, or Val, X₁₄ is Val or Arg, and X₁₅ is Leu, Gln, His, Ile, Lys, or Ser, and the sialidase comprises at least one mutation relative to wild-type human Neu2 (SEQ ID NO: 1). In certain embodiments, X₁ is Ala, Asp, Met, or not present, X₂ is Tyr or Val, X₃ is Lys or Asp, X₄ is Arg or Ala, X₅ is Pro, Asn, Gly, Ser or Thr, X₆ is Ala or Glu, X₇ is Gln or Tyr, X₈ is Ile or Lys, X₉ is Ala or Thr, X₁₀ is Gln, Ala, or Thr, X₁₁ is Ser, Arg, or Ala, X₁₂ is Trp, Lys, or Arg, X₁₃ is Ala or Cys, X₁₄ is Val or Arg, and X₁₅ is Leu or Ile.

[0273] In certain embodiments, the recombinant mutant human sialidase comprises a conservative substitution relative to a recombinant mutant human sialidase sequence disclosed herein. As used herein, the term “conservative substitution” refers to a substitution with a structurally similar amino acid. For example, conservative substitutions may include those within the following groups: Ser and Cys; Leu, Ile, and Val; Glu and Asp; Lys and Arg; Phe, Tyr, and Trp; and Gln, Asn, Glu, Asp, and His. Conservative substitutions may also be defined by the BLAST (Basic Local Alignment Search Tool) algorithm, the BLOSUM substitution matrix (e.g., BLOSUM 62 matrix), or the PAM substitution:p matrix (e.g., the PAM 250 matrix).

b. Antibody Portion

[0274] In certain embodiments, the fusion protein comprises an immunoglobulin Fc domain. As used herein, unless otherwise indicated, the term “immunoglobulin Fc domain” refers to a fragment of an immunoglobulin heavy chain constant region which, either alone or in combination with a second immunoglobulin Fc domain, is capable of binding to an Fc receptor. An immunoglobulin Fc domain may include, e.g., immunoglobulin CH2 and CH3 domains. An immunoglobulin Fc domain may include, e.g., immunoglobulin CH2 and CH3 domains and an immunoglobulin hinge region. Boundaries between immunoglobulin hinge regions, CH2, and CH3 domains are well known in the art, and can be found, e.g., in the PROSITE database (available on the world wide web at prosite.expasy.org).

[0275] In certain embodiments, the immunoglobulin Fc domain is derived from a human IgG1, IgG2, IgG3, IgG4, IgA1, IgA2, IgD, IgE, and IgM Fc domain. A single amino acid substitution (S228P according to Kabat numbering; designated IgG4Pro) may be introduced to abolish the heterogeneity observed in recombinant IgG4 antibody. See Angal, S. et al. (1993) MOL. IMMUNOL. 30:105-108.

[0276] In certain embodiments, the immunoglobulin Fc domain is derived from a human IgG1 isotype or another isotype that elicits antibody-dependent cell-mediated cytotoxicity (ADCC) and/or complement mediated cytotoxicity (CDC). In certain embodiments, the immunoglobulin Fc domain is derived from a human IgG1 isotype (e.g., SEQ ID NO: 31 or SEQ ID NO: 5).

[0277] In certain embodiments, the immunoglobulin Fc domain is derived from a human IgG4 isotype or another isotype that elicits little or no antibody-dependent cell-mediated cytotoxicity (ADCC) and/or complement mediated cytotoxicity (CDC). In certain embodiments, the immunoglobulin Fc domain is derived from a human IgG4 isotype.

[0278] In certain embodiments, the immunoglobulin Fc domain comprises either a “knob” mutation, e.g., T366Y, or a “hole” mutation, e.g., Y407T, for heterodimerization with a second polypeptide (residue numbers according to EU numbering, Kabat, E. A., et al. (1991) SEQUENCES OF PROTIENS OF IMMUNOLOGICAL IN INTEREST, FIFTH EDITION, U.S. Department of Health and Human Services, NIH Publication No. 91-3242). For example, in certain embodiments, the immunoglobulin Fc domain is derived from a human IgG1 Fc domain and comprises a Y407T mutation (e.g., the immunoglobulin Fc domain comprises SEQ ID NO: 32 or SEQ ID NO: 92). In certain embodiments, the immunoglobulin Fc domain is derived from a human IgG1 Fc domain and comprises a T366Y mutation (e.g., the second polypeptide comprises SEQ ID NO: 33 or SEQ ID NO: 93).

[0279] In certain embodiments, the immunoglobulin Fc domain is modified to prevent to glycosylation of the Fc domain. For example, in certain embodiments, the immunoglobulin Fc domain is derived from a human IgG1 Fc domain and comprises a mutation at position N297, for example, an N297A or N297G mutation (residue numbers according to EU numbering, Kabat, E. A., et al., supra). For example, in certain embodiments, the fusion protein comprises SEQ ID NO: 222, SEQ ID NO: 225, or SEQ ID NO: 226.

[0280] In certain embodiments, the fusion protein comprises an immunoglobulin antigen-binding domain. The inclusion of such a domain may improve targeting of a fusion protein to a sialylated cancer cell, e.g., a PD-L1 expressing cancer cell, and/or to the tumor microenvironment. As used herein, unless otherwise indicated, the term “immunoglobulin antigen-binding domain” refers to a polypeptide that, alone or in combination with another immunoglobulin antigen-binding domain, defines an antigen-binding site. Exemplary immunoglobulin antigen-binding domains include, for example, immunoglobulin heavy chain variable region and an immunoglobulin light chain variable region, where the variable regions together define an antigen binding site, e.g., an anti-PD-L1 antigen binding site.

[0281] In certain embodiments, the immunoglobulin antigen-binding domain is derived from an anti-PD-L1 antibody. Exemplary anti-PD-L1 antibodies are described, for example, in U.S. Pat. Nos. 9,273,135, 7,943,743, 9,175,082, 8,741,295, 8,552,154, and 8,217,149. Exemplary anti-PD-L1 antibodies include, atezolizumab (Tecentriq®, Genentech), durvalumab (AstraZeneca), MEDI4736, avelumab, CS1001 (CStone Therapeutics), KL-A167, CK-301 (Checkpoint Therapeutics), TQB2450, KN035, SHR-1316, STI-A1014, BGB-A333, MSB2311, HLX-20 and BMS-936559 by Bristol-Myers Squibb.

[0282] In certain embodiments, the immunoglobulin antigen-binding domain is derived from avelumab. The avelumab heavy chain amino acid sequence is depicted in SEQ ID NO: 63, and the avelumab light chain amino acid sequence is depicted in SEQ ID NO: 64. The amino acid sequence of an exemplary scFv derived from avelumab is depicted in SEQ ID NO: 125.

[0283] In certain embodiments, the immunoglobulin antigen-binding domain is derived from an anti-PD-L1 antibody disclosed herein, for example, an antibody comprising: (i) an immunoglobulin heavy chain variable region comprising the amino acid sequence of SEQ ID NO: 164 (PAL769-VH), and an immunoglobulin light chain variable region comprising the amino acid sequence of SEQ ID NO: 167 (PAL769-VL); (ii) an immunoglobulin heavy chain variable region comprising the amino acid sequence of SEQ ID NO: 199 (h769 VH), and an immunoglobulin light chain variable region comprising the amino acid sequence of SEQ ID NO: 200 (h769-IF3-VL); (iii) an immunoglobulin heavy chain variable region comprising the amino acid sequence of SEQ ID NO: 199 (h769-VH), and an immunoglobulin light chain variable region comprising the amino acid sequence of SEQ ID NO: 201 (h769-tm2-VL); (iv) an immunoglobulin heavy chain variable region comprising the amino acid sequence of SEQ ID NO: 199 (h769-VH), and an immunoglobulin light chain variable region comprising the amino acid sequence of SEQ ID NO: 202 (h769-tm3-VL); (v) an immunoglobulin heavy chain variable region comprising the amino acid sequence of SEQ ID NO: 199 (h769-VH), and an immunoglobulin light chain variable region comprising the amino acid sequence of SEQ ID NO: 204 (h769.T-VL); (vi) an immunoglobulin heavy chain variable region comprising the amino acid sequence of SEQ ID NO: 132 (PAL752-VH), and an immunoglobulin light chain variable region comprising the amino acid sequence of SEQ ID NO: 136 (PAL752-VL); (vii) an immunoglobulin heavy chain variable region comprising the amino acid sequence of SEQ ID NO: 140 (PAL759-VH), and an immunoglobulin light chain variable region comprising the amino acid sequence of SEQ ID NO: 144 (PAL759-VL); (viii) an immunoglobulin heavy chain variable region comprising the amino acid sequence of SEQ ID NO: 148 (PAL760-VH), and an immunoglobulin light chain variable region comprising the amino acid sequence of SEQ ID NO: 152 (PAL760-VL); (ix) an immunoglobulin heavy chain variable region comprising the amino acid sequence of SEQ ID NO: 156 (PAL767-VH), and an immunoglobulin light chain variable region comprising the amino acid sequence of SEQ ID NO: 160 (PAL767-VL); (x) an immunoglobulin heavy chain variable region comprising the amino acid sequence of SEQ ID NO: 170 (PAL771-VH), and an immunoglobulin light chain variable region comprising the amino acid sequence of SEQ ID NO: 174 (PAL771-VL); (xi) an immunoglobulin heavy chain variable region comprising the amino acid sequence of SEQ ID NO: 178 (PAL785-VH), and an immunoglobulin light chain variable region comprising the amino acid sequence of SEQ ID NO: 182 (PAL785-VL); (xii) an immunoglobulin heavy chain variable region comprising the amino acid sequence of SEQ ID NO: 186 (PAL787-VH), and an immunoglobulin light chain variable region comprising the amino acid sequence of SEQ ID NO: 190 (PAL787-VL); or (xiii) an immunoglobulin heavy chain variable region comprising the amino acid sequence of SEQ ID NO: 194 (PAL788-VH), and an immunoglobulin light chain variable region comprising the amino acid sequence of SEQ ID NO: 198 (PAL788-VL).

c. Linker

[0284] In certain embodiments, the sialidase portion of the fusion protein can be linked or fused directly to the anti-PD-L1 antibody portion (e.g., immunoglobulin Fc domain and/or immunoglobulin antigen-binding domain) of the fusion protein. In other embodiments, the sialidase portion can be covalently bound to the anti-PD-L1 antibody portion by a linker.

[0285] The linker may couple, with one or more natural amino acids, the sialidase, or functional fragment thereof, and the antibody portions or fragments, where the amino acid (for example, a cysteine amino acid) may be introduced by site-directed mutagenesis. The linker may include one or more unnatural amino acids. It is contemplated that, in certain circumstances, a linker containing for example, one or more sulfhydryl reactive groups (e.g., a maleimide) may covalently link a cysteine in the sialidase portion or the antibody portion that is a naturally occurring cysteine residue or is the product of site-specific mutagenesis.

[0286] The linker may be a cleavable linker or a non-cleavable linker. Optionally or in addition, the linker may be a flexible linker or an inflexible linker.

[0287] The linker should be a length sufficiently long to allow the sialidase and the antibody portions to be linked without steric hindrance from one another and sufficiently short to retain the intended activity of the fusion protein. The linker preferably is sufficiently hydrophilic to avoid or minimize instability of the fusion protein. The linker preferably is sufficiently hydrophilic to avoid or minimize insolubility of the fusion protein. The linker should be sufficiently stable in vivo (e.g., it is not cleaved by serum, enzymes, etc.) to permit the fusion protein to be operative in vivo.

[0288] The linker may be from about 1 angstroms (Å) to about 150 Å in length, or from about 1 Å to about 120 Å in length, or from about 5 Å to about 110 Å in length, or from about 10 Å to about 100 Å in length. The linker may be greater than about 2, 3, 4, 5, 6, 7, 8, 9, 10, 11, 12, 13, 14, 15, 16, 17, 18, 19, 20, 25, 27, 30 or greater angstroms in length and/or less than about 110, 100, 90, 85, 80, 75, 70, 65, 60, 55, 50, 45, 43, 42, 41, 40, 39, 38, 37, 36, 35, 34, 33, 32, 31, or fewer A in length. Furthermore, the linker may be about 5, 10, 15, 20, 25, 30, 35, 40, 45, 50, 55, 60, 65, 70, 75, 80, 85, 90, 95, 100, 110, and 120 Å in length.

[0289] In certain embodiments, the linker comprises a polypeptide linker that connects or fuses the sialidase portion of the fusion protein to the anti-PD-L1 antibody portion (e.g., immunoglobulin Fc domain and/or immunoglobulin antigen-binding domain) of the fusion protein. For example, it is contemplated that a gene encoding a sialidase portion linked directly or indirectly (for example, via an amino acid containing linker) to an antibody portion can be created and expressed using conventional recombinant DNA technologies. For example, the amino terminus of a sialidase portion can be linked to the carboxy terminus of either the light or the heavy chain of an antibody portion. For example, for a Fab fragment, the amino terminus or carboxy terminus of the sialidase can be linked to the first constant domain of the heavy antibody chain (CH1). When a linker is employed, the linker may comprise hydrophilic amino acid residues, such as Gln, Ser, Gly, Glu, Pro, His and Arg. In certain embodiments, the linker is a peptide containing 1-25 amino acid residues, 1-20 amino acid residues, 2-15 amino acid residues, 3-10 amino acid residues, 3-7 amino acid residues, 4-25 amino acid residues, 4-20 amino acid residues, 4-15 amino acid residues, 4-10 amino acid residues, 5-25 amino acid residues, 5-20 amino acid residues, 5-15 amino acid residues, or 5-10 amino acid residues. Exemplary linkers include glycine and serine-rich linkers, e.g., (GlyGlyPro)ₙ, or (GlyGlyGlyGlySer)ₙ, where n is 1-5. In certain embodiments, the linker comprises, consists, or consists essentially of GGGGS (SEQ ID NO: 121). In certain embodiments, the linker comprises, consists, or consists essentially of GGGGSGGGGS (SEQ ID NO: 90). In certain embodiments, the linker comprises, consists, or consists essentially of EPKSS (SEQ ID NO: 91). Additional exemplary linker sequences are disclosed, e.g., in George et al. (2003) PROTEIN ENGINEERING 15:871-879, and U.S. Pat. Nos. 5,482,858 and 5,525,491.

[0290] In certain embodiments, the fusion protein comprises the amino acid sequence of any one of SEQ ID NOs: 65-75, 78, 81-89, 95, 96, 98, 99, 101, 102, 104, 106, 108, 110, 112, 114, 122-124, 127, 128, 205-207, 211, 213, 214, or 219, or an amino acid sequence that has at least 85%, 90%, 95%, 96%, 97%, 98%, or 99% sequence identity to any one of SEQ ID NOs: 65-75, 78, 81-89, 95, 96, 98, 99, 101, 102, 104, 106, 108, 110, 112, 114, 122-124, 127, 128, 205-207, 211, 213, 214, or 219.

d. Antibody Conjugates

[0291] The invention further provides antibody conjugates containing one or more of the fusion proteins disclosed herein. As used herein, unless otherwise indicated, the term “antibody conjugate” is understood to refer to an antibody, or a functional fragment thereof, that comprises antigen-binding activity (e.g., anti-PD-L1 antigen-binding activity) and/or Fc receptor-binding activity, conjugated (e.g., covalently coupled) to an additional functional moiety. In certain embodiments, the antibody or functional antibody fragment is conjugated to a sialidase enzyme, e.g., a recombinant mutant human sialidase enzyme disclosed herein. In certain embodiments, an antibody conjugate comprises a single polypeptide chain. In certain embodiments, an antibody conjugate comprises two, three, four, or more polypeptide chains that are covalently or non-covalently associated together to produce a multimeric complex, e.g., a dimeric, trimeric or tetrameric complex. For example, an antibody conjugate may comprise a first polypeptide (fusion protein) comprising a recombinant mutant human sialidase enzyme and an immunoglobulin heavy chain, and a second polypeptide comprising an immunoglobulin light chain, where, for example, the immunoglobulin heavy and light chains together define a single antigen-binding site, e.g., an anti-PD-L1 antigen-binding site.

[0292] In certain embodiments, the antibody conjugate can include a single sialidase. In other embodiments, the antibody conjugate can include more than one (e.g., two) sialidases. If more than one sialidase is included, the sialidases can be the same or different. In certain embodiments, the antibody conjugate can include a single anti-PD-L1 antigen-binding site. In other embodiments, the antibody conjugate can include more than one (e.g., two) anti-PD-L1 antigen-binding sites. If two antigen-binding sites are used, they can be the same or different. In certain embodiments, the antibody conjugate comprises an immunoglobulin Fc fragment.

[0293] In certain embodiments, the antibody conjugate comprises one or two immunoglobulin heavy chains, or a functional fragment thereof. In certain embodiments, the antibody conjugate comprises one or two immunoglobulin light chains, or a functional fragment thereof. In certain embodiments, the antibody conjugate comprises a sialidase fused to the N- or C-terminus of an immunoglobulin heavy chain or an immunoglobulin light chain.

[0294] FIG. 4 depicts exemplary antibody conjugate constructs containing one or more sialidase enzymes. For example, in FIG. 4A, a first anti-PD-L1 antigen-binding site (e.g., defined by a VH and VL domains) is depicted as 10, a second anti-PD-L1 antigen-binding site is depicted as 20, a sialidase is depicted as 30, and a Fc is depicted as 40. In each of the constructs depicted in FIGS. 4A-4I it is understood that the Fc may optionally be modified in some manner, e.g., using Knobs-into-Holes type technology, e.g., as depicted by 50 in FIG. 4B. Throughout FIG. 4 similar structures are depicted by similar schematic representations.

[0295] FIG. 4A depicts antibody conjugate constructs comprising a first polypeptide comprising a first immunoglobulin light chain; a second polypeptide comprising a first immunoglobulin heavy chain; a third polypeptide comprising a second immunoglobulin heavy chain; and a fourth polypeptide comprising a second immunoglobulin light chain. The first and second polypeptides can be covalently linked together, the third and fourth polypeptides can be covalently linked together, and the second and third polypeptides can be covalently linked together. The covalent linkages can be disulfide bonds. In certain embodiments, the first polypeptide and the second polypeptide together define a first anti-PD-L1 antigen-binding site as depicted as 10, and the third polypeptide and the fourth polypeptide together define a second anti-PD-L1 antigen-binding site as depicted as 20. A sialidase enzyme as depicted as 30 can be conjugated to the N- or C-terminus of the first and second immunoglobulin light chain or the first and second immunoglobulin heavy chain.

[0296] FIG. 4B depicts antibody conjugate constructs comprising a first polypeptide comprising a first immunoglobulin light chain; a second polypeptide comprising a first immunoglobulin heavy chain; a third polypeptide comprising a second immunoglobulin heavy chain; and a fourth polypeptide comprising a second immunoglobulin light chain. The first and second polypeptides can be covalently linked together, the third and fourth polypeptides can be covalently linked together, and the second and third polypeptides can be covalently linked together. The covalent linkages can be disulfide bonds. In certain embodiments, the first polypeptide and the second polypeptide together define a first anti-PD-L1 antigen-binding site, and the third polypeptide and the fourth polypeptide together define a second anti-PD-L1 antigen-binding site. A sialidase enzyme can be conjugated to the N- or C-terminus of the first immunoglobulin light chain or the first immunoglobulin heavy chain.

[0297] FIG. 4C depicts antibody conjugate constructs comprising a first polypeptide comprising an immunoglobulin light chain; a second polypeptide comprising an immunoglobulin heavy chain; and a third polypeptide comprising an immunoglobulin Fc domain. The first and second polypeptides can be covalently linked together and the second and third polypeptides can be covalently linked together. The covalent linkages can be disulfide bonds. In certain embodiments, the first polypeptide and the second polypeptide together define an anti-PD-L1 antigen-binding site. A sialidase enzyme can be conjugated to the N- or C-terminus of the first immunoglobulin light chain or the first immunoglobulin heavy chain.

[0298] FIG. 4D depicts antibody conjugate constructs comprising a first polypeptide comprising an immunoglobulin light chain; a second polypeptide comprising an immunoglobulin heavy chain; and a third polypeptide comprising an immunoglobulin Fc domain and a first sialidase enzyme. The first and second polypeptides can be covalently linked together and the second and third polypeptides can be covalently linked together. The covalent linkages can be disulfide bonds. The third polypeptide comprises the sialidase and the immunoglobulin Fc domain in an N- to C-terminal orientation. In certain embodiments, the first polypeptide and the second polypeptide together define an anti-PD-L1 antigen-binding site. An optional second sialidase enzyme can be conjugated to the N- or C-terminus of the first immunoglobulin light chain or the first immunoglobulin heavy chain.

[0299] FIG. 4E depicts antibody conjugate constructs comprising a first polypeptide comprising an immunoglobulin light chain; a second polypeptide comprising an immunoglobulin heavy chain; and a third polypeptide comprising an immunoglobulin Fc domain and a first sialidase enzyme. The first and second polypeptides can be covalently linked together and the second and third polypeptides can be covalently linked together. The covalent linkages can be disulfide bonds. The third polypeptide comprises the immunoglobulin Fc domain and the sialidase in an N- to C-terminal orientation. In certain embodiments, the first polypeptide and the second polypeptide together define an anti-PD-L1 antigen-binding site. An optional second sialidase enzyme can be conjugated to the N- or C-terminus of the first immunoglobulin light chain or the first immunoglobulin heavy chain.

[0300] FIG. 4F depicts antibody conjugate constructs comprising a first polypeptide comprising a first immunoglobulin Fc domain, and a second polypeptide comprising a second immunoglobulin Fc domain. The first and second polypeptides can be covalently linked together. The covalent linkages can be disulfide bonds. A sialidase enzyme can be conjugated to the N- or C-terminus of the first immunoglobulin Fc domain or to the N- or C-terminus of the second immunoglobulin Fc domain. An optional second sialidase enzyme can be conjugated to the N- or C-terminus of the first immunoglobulin Fc domain or to the N- or C-terminus of the second immunoglobulin Fc domain.

[0301] FIG. 4G depicts antibody conjugate constructs comprising a first polypeptide comprising an immunoglobulin light chain; and a second polypeptide comprising an immunoglobulin heavy chain variable region. The first and second polypeptides can be covalently linked together. The covalent linkages can be disulfide bonds. In certain embodiments, the first polypeptide and the second polypeptide together define an anti-PD-L1 antigen-binding site. The sialidase enzyme can be conjugated to the N- or C-terminus of the immunoglobulin light chain or the immunoglobulin heavy chain variable region.

[0302] FIG. 4H depicts antibody conjugate constructs comprising a first polypeptide comprising a first immunoglobulin Fc domain, and a second polypeptide comprising a second immunoglobulin Fc domain. The first and second polypeptides can be covalently linked together. The covalent linkages can be disulfide bonds. A sialidase enzyme can be conjugated to the N-terminus of the first immunoglobulin Fc domain or the second immunoglobulin Fc domain. An optional second sialidase enzyme can be conjugated to the N-terminus of the second immunoglobulin Fc domain or the first immunoglobulin Fc domain, respectively. A single chain variable fragment (scFv) can be conjugated to the C-terminus of the first immunoglobulin Fc domain or the second immunoglobulin Fc domain. An optional second single chain variable fragment (scFv) can be conjugated to the C-terminus of the first immunoglobulin Fc domain or the second immunoglobulin Fc domain, respectively.

[0303] FIG. 4I depicts antibody conjugate constructs similar to those depicted in FIG. 4H except that each scFv is replaced with an immunoglobulin antigen binding fragment, e.g., a Fab. For example, FIG. 4I depicts antibody conjugate constructs comprising a first polypeptide comprising a first immunoglobulin Fc domain, and a second polypeptide comprising a second immunoglobulin Fc domain. The first and second polypeptides can be covalently linked together. The covalent linkages can be disulfide bonds. A sialidase enzyme can be conjugated to the N-terminus of the first immunoglobulin Fc domain or the second immunoglobulin Fc domain. An optional second sialidase enzyme can be conjugated to the N-terminus of the second immunoglobulin Fc domain or the first immunoglobulin Fc domain, respectively. An antibody fragment (Fab) can be conjugated or fused to the C-terminus of the first immunoglobulin Fc domain or the second immunoglobulin Fc domain. An optional second antibody fragment (Fab) can be conjugated or fused to the C-terminus of the second immunoglobulin Fc domain or the first immunoglobulin Fc domain, respectively. In the case of a fusion, the C terminus of the Fc domain is linked (either by a bond or an amino acid linker) to a first polypeptide chain defining an anti-PD-L1 immunoglobulin antigen binding fragment. In the case of antibodies that have an antigen binding site defined by a single variable region, then this may be sufficient to impart binding affinity to a target antigen, e.g., PD-L1. In other instances, e.g., in the case of a human antibody, the first polypeptide chain defining an immunoglobulin antigen binding fragment can be conjugated (e.g., covalently conjugated, e.g., via a disulfide bond) to a second polypeptide chain defining an immunoglobulin antigen binding fragment, there the two antigen binding fragments together define an antigen binding site for binding the target antigen, e.g., PD-L1.

[0304] FIG. 5 depicts additional antibody conjugate constructs. For example, FIG. 5 depicts an antibody conjugate construct comprising a first polypeptide comprising an immunoglobulin light chain; a second polypeptide comprising an immunoglobulin heavy chain and an scFv; and a third polypeptide comprising an immunoglobulin Fc domain and a first sialidase enzyme. The first and second polypeptides can be covalently linked together and the second and third polypeptides can be covalently linked together. The covalent linkages can be disulfide bonds. The second polypeptide comprises the heavy chain and the scFv in an N- to C-terminal orientation. The third polypeptide comprises the sialidase and the immunoglobulin Fc domain in an N- to C-terminal orientation. In certain embodiments, the first polypeptide and the second polypeptide together define a first antigen-binding site. In certain embodiments, the scFv defines a second antigen-binding site. FIG. 5 depicts an additional antibody construct comprising a first polypeptide comprising an immunoglobulin light chain; a second polypeptide comprising an immunoglobulin heavy chain; and a third polypeptide comprising an immunoglobulin Fc domain and a first sialidase enzyme, wherein a Fab fragment is conjugated to the N-terminus of the immunoglobulin heavy chain. The first and second polypeptides can be covalently linked together and the second and third polypeptides can be covalently linked together. The covalent linkages can be disulfide bonds. The third polypeptide comprises the sialidase and the immunoglobulin Fc domain in an N- to C-terminal orientation. In certain embodiments, the first polypeptide and the second polypeptide together define a first antigen-binding site. In certain embodiments, the Fab fragment defines a second antigen-binding site. In each of the constructs depicted in FIG. 5 it is understood that an scFv, when present, may be replaced with a Fab fragment, or a Fab fragment, when present, may be replaced with an scFv. In each of the constructs depicted in FIG. 5, it is understood that the Fc may optionally be modified in some manner.

[0305] In certain embodiments, the antibody conjugate comprises a first polypeptide comprising a first immunoglobulin light chain; a second polypeptide comprising a first immunoglobulin heavy chain and a first sialidase; a third polypeptide comprising a second immunoglobulin heavy chain and a second sialidase; and a fourth polypeptide comprising a second immunoglobulin light chain. An example of this embodiment is shown in FIG. 6A. The first and second polypeptides can be covalently linked together, the third and fourth polypeptides can be covalently linked together, and the second and third polypeptides can be covalently linked together. The covalent linkages can be disulfide bonds. In certain embodiments, the first polypeptide and the second polypeptide together define a first anti-PD-L1 antigen-binding site, and the third polypeptide and the fourth polypeptide together define a second anti-PD-L1 antigen-binding site. In certain embodiments, the second and third polypeptides comprise the first and second immunoglobulin heavy chain and the first and second sialidase, respectively, in an N- to C-terminal orientation. In certain embodiments, the second and third polypeptides comprise the first and second sialidase and the first and second immunoglobulin heavy chain, respectively, in an N- to C-terminal orientation.

[0306] In certain embodiments, the antibody conjugate comprises a first polypeptide comprising an immunoglobulin light chain; a second polypeptide comprising an immunoglobulin heavy chain; and a third polypeptide comprising an immunoglobulin Fc domain and a sialidase. An example of this embodiment is shown in FIG. 6B. The first and second polypeptides can be covalently linked together and the second and third polypeptides can be covalently linked together. The covalent linkages can be disulfide bonds. In certain embodiments, the first polypeptide and the second polypeptide together define an anti-PD-L1 antigen-binding site. In certain embodiments, the third polypeptide comprises the sialidase and the immunoglobulin Fc domain in an N- to C-terminal orientation, or the immunoglobulin Fc domain and the sialidase in an N- to C-terminal orientation.

[0307] In certain embodiments, the first polypeptide comprises the amino acid sequence of any one of SEQ ID NOs: 65 or 205, or an amino acid sequence that has at least 85%, 90%, 95%, 96%, 97%, 98%, or 99% sequence identity to any one of SEQ ID NOs: 65 or 205. In certain embodiments, the second polypeptide comprises the amino acid sequence of any one of SEQ ID NOs: 66, 104, 124, 206, or 213, or an amino acid sequence that has at least 85%, 90%, 95%, 96%, 97%, 98%, or 99% sequence identity to any one of SEQ ID NOs: 66, 104, 124, 206, or 213. In certain embodiments, the third polypeptide comprises the amino acid sequence of any one of SEQ ID NOs: 67-73, 78, 81-87, 95, 96, 98, 99, 101, 102, 106, 108, 112, 122, 123, 127, 128, 207, 211, 214, or 219, or an amino acid sequence that has at least 85%, 90%, 95%, 96%, 97%, 98%, or 99% sequence identity to any one of SEQ ID NOs: 67-73, 78, 81-87, 95, 96, 98, 99, 101, 102, 106, 108, 112, 122, 123, 127, 128, 207, 211, 214, or 219.

[0308] In certain embodiments, the third polypeptide comprises the amino acid sequence of

(SEQ ID NO: 240)
X₁X₂SX₃X₄X₅LQX₆SVFQSGAHAYRIPALLYLPGQQSLLAFAEQRX₇S
X₈X₉DEHAELIVX₁₀RRGDYDAX₁₁THQVQWX₁₂AQEVVAQAX₁₃LX₁₄G
HRSMNPCPLYDX₁₅QTGTLFLFFIAIPX₁₆X₁₇VTEX₁₈QQLQTRANVTR
LX₁₉X₂₀VTSTDHGRTWSSPRDLTDAAIGPX₂₁YREWSTFAVGPGHX₂₂L
QLHDX₂₃X₂₄RSLVVPAYAYRKLHPX₂₅X₂₆X₂₇PIPSAFX₂₈FLSHDHG
RTWARGHFVX₂₉QDTX₃₀ECQVAEVX₃₁TGEQRVVTLNARSX₃₂X₃₃X₃₄
X₃₅RX₃₆QAQSX₃₇NX₃₈GLDFQX₃₉X₄₀QX₄₁VKKLX₄₂EPPPX₄₃G
X₄₄QGSVISFPSPRSGPGSPAQX₄₅LLYTHPTHX₄₆X₄₇QRADLGAYLNP
RPPAPEAWSEPX₄₈LLAKGSX₄₉AYSDLQSMGTGPDGSPLFGX₅₀LYEAN
DYEEIX₅₁FX₅₂MFTLKQAFPAEYLPQX₅₃DKTHTCPPCPAPELLGGPSV
FLFPPKPKDTLMISRTPEVTCVVVDVSHEDPEVKFNWYVDGVEVHNAKTK
PREEQYNSTYRVVSVLTVLHQDWLNGKEYKCKVSNKALPAPIEKTISKAK
GQPREPQVYTLPPSREEMTKNQVSLTCLVKGFYPSDIAVEWESNGQPENN
YKTTPPVLDSDGSFFLTSKLTVDKSRWQQGNVFSCSVMHEALHNHYTQKS
LSLSPGK,

wherein X₁ is Ala, Arg, Asn, Asp, Gln, Glu, Gly, His, Leu, Lys, Met, Phe, Thr, Val, or not present, X₂ is Ala or Lys, X₃ is Asn or Leu, X₄ is Pro or His, X₅ is Phe, Trp, Tyr or Val, X₆ is Lys or Asp, X₇ is Ala or Arg, X₈ is Lys, Arg, or Glu, X₉ is Lys, Ala, Arg, or Glu, X₁₀ is Leu or Met, X₁₁ is Pro, Asn, Asp, His, Glu, Gly, Ser or Thr, X₁₂ is Gln or His, X₁₃ is Arg or Lys, X₁₄ is Asp or Pro, X₁₅ is Ala, Glu or Lys, X₁₆ is Gly or Asp, X₁₇ is Gln or His, X₁₈ is Gln, Arg, or Lys, X₁₉ is Ala, Cys, Ile, Ser, Val, or Leu, X₂₀ is Gln, Leu, Glu, Phe, His, Ile, Leu, or Tyr, X₂₁ is Ala or Val, X₂₂ is Cys or Gly, X₂₃ is Arg or Pro, X₂₄ is Ala or Gly, X₂₅ is Arg, Ile, or Lys, X₂₆ is Gln or Pro, X₂₇ is Arg or Pro, X₂₈ is Ala, Cys, Leu, or Val, X₂₉ is Ala, Cys, Asn, Ser, or Thr, X₃₀ is Leu, Ala, or Val, X₃₁ is Glu or Pro, X₃₂ is His or Pro, X₃₃ is Leu, Asp, Asn, or Tyr, X₃₄ is Arg, Ala, Asp, Leu, Gln, or Tyr, X₃₅ is Ala, Cys, Phe, Gly, His, Ile, Lys, Leu, Met, Asn, Gln, Arg, Ser, Val, Trp, or Tyr, X₃₆ is Val, Ile, or Lys, X₃₇ is Thr or Ala, X₃₈ is Asp or Gly, X₃₉ is Glu, Lys, or Pro, X₄₀ is Ser or Cys, X₄₁ is Leu, Asp, Phe, Gln, or Thr, X₄₂ is Val or Phe, X₄₃ is Gln, Ala, His, Phe, Pro, Ser, or Thr, X₄₄ is Cys or Val, X₄₅ is Trp or Arg, X₄₆ is Ser, Arg, Ala, Asp, Glu, Phe, Gly, His, Ile, Lys, Leu, Met, Asn, Pro, Gln, Thr, Val, Trp, or Tyr, X₄₇ is Trp, Lys, Ala, Asp, Glu, Phe, Gly, His, Ile, Lys, Leu, Met, Asn, Pro, Gln, Arg, Ser, Thr, Val, or Tyr, X₄₈ is Lys or Val, X₄₉ is Ala, Cys, Ser, or Val, X₅₀ is Cys, Leu, or Val, X₅₁ is Val or Arg, X₅₂ is Leu, Gln, His, Ile, Lys, or Ser, and X₅₃ is GGGGS (SEQ ID NO: 121), GGGGSGGGGS (SEQ ID NO: 90), or EPKSS (SEQ ID NO: 91), and the sialidase comprises at least one mutation relative to wild-type human Neu2 (SEQ ID NO: 1).

[0309] In certain embodiments, the third polypeptide comprises the amino acid sequence of

(SEQ ID NO: 241)
X₁ASLPX₂LQX₃ESVFQSGAHAYRIPALLYLPGQQSLLAFAEQRX₄SKKD
EHAELIVLRRGDYDAX₅THQVQWQAQEVVAQARLDGHRSMNPCPLYDX₆Q
TGTLFLFFIAIPGQVTEQQQLQTRANVTRLCX₇VTSTDHGRTWSSPRDLT
DAAIGPAYREWSTFAVGPGHCLQLHDRARSLVVPAYAYRKLHPX₈QRPIP
SAFCFLSHDHGRTWARGHFVAQDTLECQVAEVETGEQRVVTLNARSHLR
X₉RVQAQSTNDGLDFQESQLVKKLVEPPPX₁₀GCQGSVISFPSPRSGPGS
PAQWLLYTHPTHX₁₁X₁₂QRADLGAYLNPRPPAPEAWSEPVLLAKGSX₁₃
AYSDLQSMGTGPDGSPLFGCLYEANDYEEIX₁₄FX₁₅MFTLKQAFPAEYL
PQX₁₆DKTHTCPPCPAPELLGGPSVFLFPPKPKDTLMISRTPEVTCVVVD
VSHEDPEVKFNWYVDGVEVHNAKTKPREEQYNSTYRVVSVLTVLHQDWLN
GKEYKCKVSNKALPAPIEKTISKAKGQPREPQVYTLPPSREEMTKNQVSL
TCLVKGFYPSDIAVEWESNGQPENNYKTTPPVLDSDGSFFLTSKLTVDKS
RWQQGNVFSCSVMHEALHNHYTQKSLSLSPGK,

wherein X₁ is Ala, Arg, Asn, Asp, Gln, Glu, Gly, His, Leu, Lys, Met, Phe, Thr, Val, or not present, X₂ is Phe, Trp, Tyr or Val, X₃ is Lys or Asp, X₄ is Arg or Ala, X₅ is Pro, Asn, Asp, His, Glu, Gly, Ser or Thr, X₆ is Ala, Glu, or Lys, X₇ is Gln, Leu, Glu, Phe, His, Ile, Leu, or Tyr, X₈ is Arg, Ile, or Lys, X₉ is Ala, Cys, Phe, Gly, His, Ile, Lys, Leu, Met, Asn, Gln, Arg, Ser, Val, Trp, or Tyr, X₁₀ is Gln, Ala, His, Phe, Pro, Ser, or Thr, X₁₁ is Ser, Arg, Ala, Asp, Glu, Phe, Gly, His, Ile, Lys, Leu, Met, Asn, Pro, Gln, Thr, Val, Trp, or Tyr, X₁₂ is Trp, Lys, Ala, Asp, Glu, Phe, Gly, His, Ile, Lys, Leu, Met, Asn, Pro, Gln, Arg, Ser, Thr, Val, or Tyr, X₁₃ is Ala, Cys, Ser, or Val, X₁₄ is Val or Arg, X₁₅ is Leu, Gln, His, Ile, Lys, or Ser, and X₁₆ is GGGGS (SEQ ID NO: 121), GGGGSGGGGS (SEQ ID NO: 90), or EPKSS (SEQ ID NO: 91), and the sialidase comprises at least one mutation relative to wild-type human Neu2 (SEQ ID NO: 1). In certain embodiments, X₁ is Ala, Asp, Met, or not present, X₂ is Tyr or Val, X₃ is Lys or Asp, X₄ is Arg or Ala, X₅ is Pro, Asn, Gly, Ser or Thr, X₆ is Ala or Glu, X₇ is Gln or Tyr, X₈ is Ile or Lys, X₉ is Ala or Thr, X₁₀ is Gln, Ala, or Thr, X₁₁ is Ser, Arg, or Ala, X₁₂ is Trp, Lys, or Arg, X₁₃ is Ala or Cys, X₁₄ is Val or Arg, and X₁₅ is Leu or Ile.

[0310] In certain embodiments, the first polypeptide comprises SEQ ID NO: 65, the second polypeptide comprises SEQ ID NO: 66, and the third polypeptide comprises SEQ ID NO: 67. In certain embodiments, the first polypeptide comprises SEQ ID NO: 65, the second polypeptide comprises SEQ ID NO: 66, and the third polypeptide comprises SEQ ID NO: 68. In certain embodiments, the first polypeptide comprises SEQ ID NO: 65, the second polypeptide comprises SEQ ID NO: 66, and the third polypeptide comprises SEQ ID NO: 69. In certain embodiments, the first polypeptide comprises SEQ ID NO: 65, the second polypeptide comprises SEQ ID NO: 66, and the third polypeptide comprises SEQ ID NO: 70. In certain embodiments, the first polypeptide comprises SEQ ID NO: 65, the second polypeptide comprises SEQ ID NO: 66, and the third polypeptide comprises SEQ ID NO: 71. In certain embodiments, the first polypeptide comprises SEQ ID NO: 65, the second polypeptide comprises SEQ ID NO: 66, and the third polypeptide comprises SEQ ID NO: 72. In certain embodiments, the first polypeptide comprises SEQ ID NO: 65, the second polypeptide comprises SEQ ID NO: 66, and the third polypeptide comprises SEQ ID NO: 73. In certain embodiments, the first polypeptide comprises SEQ ID NO: 65, the second polypeptide comprises SEQ ID NO: 66, and the third polypeptide comprises SEQ ID NO: 78. In certain embodiments, the first polypeptide comprises SEQ ID NO: 65, the second polypeptide comprises SEQ ID NO: 66, and the third polypeptide comprises SEQ ID NO: 81. In certain embodiments, the first polypeptide comprises SEQ ID NO: 65, the second polypeptide comprises SEQ ID NO: 66, and the third polypeptide comprises SEQ ID NO: 82. In certain embodiments, the first polypeptide comprises SEQ ID NO: 65, the second polypeptide comprises SEQ ID NO: 66, and the third polypeptide comprises SEQ ID NO: 83. In certain embodiments, the first polypeptide comprises SEQ ID NO: 65, the second polypeptide comprises SEQ ID NO: 66, and the third polypeptide comprises SEQ ID NO: 84. In certain embodiments, the first polypeptide comprises SEQ ID NO: 65, the second polypeptide comprises SEQ ID NO: 66, and the third polypeptide comprises SEQ ID NO: 85. In certain embodiments, the first polypeptide comprises SEQ ID NO: 65, the second polypeptide comprises SEQ ID NO: 66, and the third polypeptide comprises SEQ ID NO: 86. In certain embodiments, the first polypeptide comprises SEQ ID NO: 65, the second polypeptide comprises SEQ ID NO: 66, and the third polypeptide comprises SEQ ID NO: 87. In certain embodiments, the first polypeptide comprises SEQ ID NO: 65, the second polypeptide comprises SEQ ID NO: 66, and the third polypeptide comprises SEQ ID NO: 95. In certain embodiments, the first polypeptide comprises SEQ ID NO: 65, the second polypeptide comprises SEQ ID NO: 66, and the third polypeptide comprises SEQ ID NO: 96. In certain embodiments, the first polypeptide comprises SEQ ID NO: 65, the second polypeptide comprises SEQ ID NO: 66, and the third polypeptide comprises SEQ ID NO: 98. In certain embodiments, the first polypeptide comprises SEQ ID NO: 65, the second polypeptide comprises SEQ ID NO: 66, and the third polypeptide comprises SEQ ID NO: 99. In certain embodiments, the first polypeptide comprises SEQ ID NO: 65, the second polypeptide comprises SEQ ID NO: 66, and the third polypeptide comprises SEQ ID NO: 101. In certain embodiments, the first polypeptide comprises SEQ ID NO: 65, the second polypeptide comprises SEQ ID NO: 66, and the third polypeptide comprises SEQ ID NO: 102. In certain embodiments, the first polypeptide comprises SEQ ID NO: 65, the second polypeptide comprises SEQ ID NO: 66, and the third polypeptide comprises SEQ ID NO: 106. In certain embodiments, the first polypeptide comprises SEQ ID NO: 65, the second polypeptide comprises SEQ ID NO: 66, and the third polypeptide comprises SEQ ID NO: 112. In certain embodiments, the first polypeptide comprises SEQ ID NO: 65, the second polypeptide comprises SEQ ID NO: 66, and the third polypeptide comprises SEQ ID NO: 127. In certain embodiments, the first polypeptide comprises SEQ ID NO: 65, the second polypeptide comprises SEQ ID NO: 66, and the third polypeptide comprises SEQ ID NO: 128. In certain embodiments, the first polypeptide comprises SEQ ID NO: 65, the second polypeptide comprises SEQ ID NO: 104, and the third polypeptide comprises SEQ ID NO: 108. In certain embodiments, the first polypeptide comprises SEQ ID NO: 65, the second polypeptide comprises SEQ ID NO: 124, and the third polypeptide comprises SEQ ID NO: 122. In certain embodiments, the first polypeptide comprises SEQ ID NO: 65, the second polypeptide comprises SEQ ID NO: 124, and the third polypeptide comprises SEQ ID NO: 123.

[0311] In certain embodiments, the first polypeptide comprises SEQ ID NO: 205, the second polypeptide comprises SEQ ID NO: 206, and the third polypeptide comprises SEQ ID NO: 207. In certain embodiments, the first polypeptide comprises SEQ ID NO: 205, the second polypeptide comprises SEQ ID NO: 206, and the third polypeptide comprises SEQ ID NO: 211. In certain embodiments, the first polypeptide comprises SEQ ID NO: 205, the second polypeptide comprises SEQ ID NO: 213, and the third polypeptide comprises SEQ ID NO: 214. In certain embodiments, the first polypeptide comprises SEQ ID NO: 205, the second polypeptide comprises SEQ ID NO: 213, and the third polypeptide comprises SEQ ID NO: 219.

[0312] In certain embodiments, the antibody conjugate comprises a first polypeptide comprising a first sialidase, a first immunoglobulin Fc domain, and a first single chain variable fragment (scFv) (it is also understood that the scFv may be replaced by a first polypeptide chain of an immunoglobulin antigen binding fragment, e.g., Fab fragment); and a second polypeptide comprising a second sialidase, a second immunoglobulin Fc domain, and a second single chain variable fragment (scFv) (it is also understood that the scFv may be replaced by a second polypeptide chain of an immunoglobulin antigen binding fragment, e.g., Fab fragment). An example of this embodiment is shown in FIG. 6C (in the construct depicted in FIG. 6C it is understood that an scFv, when present, may be replaced with a Fab fragment, or a Fab fragment, when present, may be replaced with an scFv). The first and second polypeptides can be covalently linked together. The covalent linkages can be disulfide bonds. In certain embodiments, the first scFv defines a first anti-PD-L1 antigen-binding site, and the second scFv defines a second anti-PD-L1 antigen-binding site. In certain embodiments, the first polypeptide comprises the first sialidase, the first immunoglobulin Fc domain, and the first scFv in an N- to C-terminal orientation. In certain embodiments, the first polypeptide comprises the first scFv, the first immunoglobulin Fc domain, and the first sialidase in an N- to C-terminal orientation. In certain embodiments, the second polypeptide comprises the second sialidase, the second immunoglobulin Fc domain, and the second scFv in an N- to C-terminal orientation. In certain embodiments, the second polypeptide comprises the second scFv, the second immunoglobulin Fc domain, and the second sialidase in an N- to C-terminal orientation.

[0313] In certain embodiments, the antibody conjugate comprises: a first polypeptide comprising an immunoglobulin light chain; a second polypeptide comprising an immunoglobulin heavy chain and a single chain variable fragment (scFv) (it is also understood that the scFv may be replaced by a first polypeptide chain of an immunoglobulin antigen binding fragment, e.g., Fab fragment); and a third polypeptide comprising an immunoglobulin Fc domain and a sialidase. It is also understood that the immunoglobulin light chain and the immunoglobulin heavy chain variable region may be swapped. An example of this embodiment is shown in FIG. 6D. The first and second polypeptides can be covalently linked together and the second and third polypeptides can be covalently linked together. The covalent linkages can be disulfide bonds. In certain embodiments, the first polypeptide and the second polypeptide together define a first anti-PD-L1 antigen-binding site (i.e., the immunoglobulin light chain and immunoglobulin heavy chain together define a first anti-PD-L1 antigen-binding site). In certain embodiments, the scFv defines a second anti-PD-L1 antigen-binding site. In certain embodiments, the second polypeptide comprises the immunoglobulin heavy chain and the scFv in an N- to C-terminal orientation, or the scFv and the immunoglobulin heavy chain in an N- to C-terminal orientation. In certain embodiments, the third polypeptide comprises the sialidase and the immunoglobulin Fc domain in an N- to C-terminal orientation, or the sialidase and the immunoglobulin Fc domain in an N- to C-terminal orientation.

[0314] In certain embodiments, the antibody conjugate comprises a first polypeptide comprising an immunoglobulin light chain; a second polypeptide comprising a first sialidase, a first immunoglobulin Fc domain, and a first immunoglobulin heavy chain variable region; a third polypeptide comprising a second sialidase, a second immunoglobulin Fc domain, and a second immunoglobulin heavy chain variable region; and a fourth polypeptide comprising a second immunoglobulin light chain. It is also understood that an immunoglobulin light chain may be replaced by an immunoglobulin heavy chain variable region and an immunoglobulin heavy chain variable region may be replaced by an immunoglobulin light chain (e.g., the antibody conjugate may comprise a first polypeptide comprising an immunoglobulin heavy chain variable region; a second polypeptide comprising a first sialidase, a first immunoglobulin Fc domain, and a first immunoglobulin light chain; a third polypeptide comprising a second sialidase, a second immunoglobulin Fc domain, and a second immunoglobulin light chain; and a fourth polypeptide comprising a second immunoglobulin heavy chain variable region). An example of this embodiment is shown in FIG. 6E. The second and third polypeptides can be covalently linked together. The covalent linkages can be disulfide bonds. In certain embodiments, the first and second polypeptides defines a first anti-PD-1 antigen-binding site, and the third and fourth polypeptides defines a second anti-PD-1 antigen-binding site. In certain embodiments, the second polypeptide comprises the first sialidase, the first immunoglobulin Fc domain, and the first immunoglobulin heavy chain variable region in an N- to C-terminal orientation. In certain embodiments, the third polypeptide comprises the second sialidase, the second immunoglobulin Fc domain, and the second immunoglobulin heavy chain variable region in an N- to C-terminal orientation.

[0315] In certain embodiments, the antibody conjugate has a molecular weight from about 135 kDa to about 165 kDa, e.g., about 140 kDa. In other embodiments, the antibody conjugate has a molecular weight from about 215 kDa to about 245 kDa, e.g., about 230 kDa.

[0316] In certain embodiments, the antibody conjugate comprises two polypeptides that each comprise an immunoglobulin Fc domain, and the first polypeptide has either a “knob” mutation, e.g., T366Y, or a “hole” mutation, e.g., Y407T, for heterodimerization with the second polypeptide, and the second polypeptide has either a respective “knob” mutation, e.g., T366Y, or a “hole” mutation, e.g., Y407T, for heterodimerization with the first polypeptide (residue numbers according to EU numbering, Kabat, E. A., et al. (1991) supra). For example, in certain embodiments, the antibody comprises two polypeptides that each comprise an immunoglobulin Fc domain derived from human IgG1 Fc domain, and the first polypeptide comprises a Y407T mutation (e.g., the first polypeptide comprises SEQ ID NO: 32 or SEQ ID NO: 92), and the second polypeptide comprises a T366Y mutation (e.g., the second polypeptide comprises SEQ ID NO: 33 or SEQ ID NO: 93).

[0317] In certain embodiments, the antibody conjugate comprises an immunoglobulin Fc domain that is modified to prevent to glycosylation of the Fc domain. For example, in certain embodiments, the immunoglobulin Fc domain is derived from a human IgG1 Fc domain and comprises a mutation at position N297, for example, an N297A or N297G mutation (residue numbers according to EU numbering, Kabat, E. A., et al., supra). For example, in certain embodiments, the antibody conjugate comprises SEQ ID NO: 222, SEQ ID NO: 225, or SEQ ID NO: 226.

[0318] As used herein, the term “multispecific antibody” is understood to mean an antibody that specifically binds to at least two different antigens, i.e., an antibody that comprises at least two antigen-binding sites that bind to at least two different antigens. As used herein, the term “bispecific antibody” is understood to mean an antibody that specifically binds to two different antigens, i.e., an antibody that comprises two antigen-binding sites each of which bind to separate and distinct antigens. In other words, a first binding site binds a first antigen and a second binding site binds a second, different antigen. A multispecific or bispecific antibody may, for example, be a human or humanized antibody, and/or be a full length antibody or an antibody fragment (e.g., a F(ab′)2 bispecific antibody).

[0319] The present invention encompasses antibody conjugates comprising antibody fragments, which may be generated by traditional means, such as enzymatic digestion, or by recombinant techniques. For a review of certain antibody fragments, see Hudson et al. (2003) supra.

[0320] In certain embodiments, the antibody conjugate or fusion protein can be covalently or non-covalently associated with a biological modifier, wherein the biological modifier can be used to enhance the solubility of the antibody, increase binding specificity, decrease immunogenicity or toxicity or modify the pharmacokinetic profile of the antibody. For example, the biological modifier can be used to increase the molecular weight of the antibody to increase its circulating half-life.

[0321] It is contemplated that the antibody conjugate or fusion protein may be covalently bound to one or more (for example, 2, 3, 4, 5, 6, 8, 9, 10 or more) biological modifiers that may comprise linear or branched polymers. Exemplary biological modifiers may include, for example, a variety of polymers, such as those described in U.S. Pat. No. 7,842,789. Particularly useful are polyalkylene ethers such as polyethylene glycol (PEG) and derivatives thereof (for example, alkoxy polyethylene glycol, for example, methoxypolyethylene glycol, ethoxypolyethylene glycol and the like); block copolymers of polyoxyethylene and polyoxypropylene (Pluronics); polymethacrylates; carbomers; and branched or unbranched polysaccharides which comprise the saccharide monomers such as D-mannose, D- and L-galactose, fucose, fructose, D-xylose, L-arabinose, and D-glucuronic acid.

[0322] In other embodiments, the biological modifier can be a hydrophilic polyvinyl polymer such as polyvinyl alcohol and polyvinylpyrrolidone (PVP)-type polymers. The biological modifier can be a functionalized polyvinylpyrrolidone, for example, carboxy or amine functionalized on one (or both) ends of the polymer (as available from PolymerSource). Alternatively, the biological modifier can include Poly N-(2-hydroxypropyl)methacrylamide (HPMA), or functionalized HPMA (amine, carboxy, etc.), Poly(N-isopropylacrylamide) or functionalized poly(N-isopropylacrylamide). Alternatively, the biological modifier can include Poly N-(2-hydroxypropyl)methacrylamide (HPMA), or functionalized HPMA (amine, carboxy, etc.), Poly(N-isopropylacrylamide) or functionalized poly(N-isopropylacrylamide). The modifier prior to conjugation need not be, but preferably is, water soluble, but the final conjugate should be water soluble.

[0323] In general, the biological modifier may have a molecular weight from about 2 kDa to about 5 kDa, from about 2 kDa to about 10 kDa, from about 2 kDa to about 20 kDa, from about 2 kDa to about 30 kDa, from about 2 kDa to about 40 kDa, from about 2 kDa to about 50 kDa, from about 2 kDa to about 60 kDa, from about 2 kDa to about 70 kDa, from about 2 kDa to about 80 kDa, from about 2 kDa to about 90 kDa, from about 2 kDa to about 100 kDa, from about 2 kDa to about 150 kDa, from about 5 kDa to about 10 kDa, from about 5 kDa to about 20 kDa, from about 5 kDa to about 30 kDa, from about 5 kDa to about 40 kDa, from about 5 kDa to about 50 kDa, from about 5 kDa to about 60 kDa, from about 5 kDa to about 70 kDa, from about 5 kDa to about 80 kDa, from about 5 kDa to about 90 kDa, from about 5 kDa to about 100 kDa, from about 5 kDa to about 150 kDa, from about 10 kDa to about 20 kDa, from about 10 kDa to about 30 kDa, from about 10 kDa to about 40 kDa, from about 10 kDa to about 50 kDa, from about 10 kDa to about 60 kDa, from about 10 kDa to about 70 kDa, from about 10 kDa to about 80 kDa, from about 10 kDa to about 90 kDa, from about 10 kDa to about 100 kDa, from about 10 kDa to about 150 kDa, from about 20 kDa to about 30 kDa, from about 20 kDa to about 40 kDa, from about 20 kDa to about 50 kDa, from about 20 kDa to about 60 kDa, from about 20 kDa to about 70 kDa, from about 20 kDa to about 80 kDa, from about 20 kDa to about 90 kDa, from about 20 kDa to about 100 kDa, from about 20 kDa to about 150 kDa, from about 30 kDa to about 40 kDa, from about 30 kDa to about 50 kDa, from about 30 kDa to about 60 kDa, from about 30 kDa to about 70 kDa, from about 30 kDa to about 80 kDa, from about 30 kDa to about 90 kDa, from about 30 kDa to about 100 kDa, from about 30 kDa to about 150 kDa, from about 40 kDa to about 50 kDa, from about 40 kDa to about 60 kDa, from about 40 kDa to about 70 kDa, from about 40 kDa to about 80 kDa, from about 40 kDa to about 90 kDa, from about 40 kDa to about 100 kDa, from about 40 kDa to about 150 kDa, from about 50 kDa to about 60 kDa, from about 50 kDa to about 70 kDa, from about 50 kDa to about 80 kDa, from about 50 kDa to about 90 kDa, from about 50 kDa to about 100 kDa, from about 50 kDa to about 150 kDa, from about 60 kDa to about 70 kDa, from about 60 kDa to about 80 kDa, from about 60 kDa to about 90 kDa, from about 60 kDa to about 100 kDa, from about 60 kDa to about 150 kDa, from about 70 kDa to about 80 kDa, from about 70 kDa to about 90 kDa, from about 70 kDa to about 100 kDa, from about 70 kDa to about 150 kDa, from about 80 kDa to about 90 kDa, from about 80 kDa to about 100 kDa, from about 80 kDa to about 150 kDa, from about 90 kDa to about 100 kDa, from about 90 kDa to about 150 kDa, or from about 100 kDa to about 150 kDa.

[0324] It is contemplated that the antibody conjugate or fusion protein is attached to about 10 or fewer polymer molecules (e.g., 9, 8, 7, 6, 5, 4, 3, 2, or 1), each polymer molecule having a molecular weight of at least about 20,000 D, or at least about 30,000 D, or at least about 40,000 D.

[0325] Although a variety of polymers can be used as biological modifiers, it is contemplated that the antibody conjugates or fusion proteins described herein may be attached to polyethylene glycol (PEG) polymers. In one embodiment, the antibody conjugate or fusion protein described herein is covalently attached to at least one PEG having an actual MW of at least about 20,000 D. In another embodiment, the antibody conjugate or fusion protein described herein is covalently attached to at least one PEG having an actual MW of at least about 30,000 D. In another embodiment, the antibody conjugate or fusion protein described herein is covalently attached to at least one PEG having an actual MW of at least about 40,000 D. In certain embodiments, the PEG is methoxyPEG (5000)-succinimidylpropionate (mPEG-SPA), methoxyPEG (5000)-succinimidylsuccinate (mPEG-SS). Such PEGS are commercially available from Nektar Therapeutics or SunBiowest.

[0326] Attachment sites on an antibody conjugate or fusion protein for a biological modifier include the N-terminal amino group and epsilon amino groups found on lysine residues, as well as other amino, imino, carboxyl, sulfhydryl, hydroxyl or other hydrophilic groups. The polymer may be covalently bonded directly to the antibody conjugate or fusion protein with or without the known use of a multifunctional (ordinarily bifunctional) crosslinking agent using chemistries and used in the art. For example, sulfhydryl groups can be derivatized by coupling to maleimido-substituted PEG (e.g., alkoxy-PEG amine plus sulfosuccinimidyl 4-(N-maleimidomethyl)cyclohexane-1-carboxylate), or PEG-maleimide commercially available from Shearwater Polymers, Inc., Huntsville, Ala.).

### II. Methods of Making an Antibody, Fusion Protein, or Antibody Conjugate

[0327] Methods for producing antibodies, fusion proteins, or antibody conjugates, e.g., those disclosed herein, are known in the art. For example, DNA molecules encoding light chain variable regions and/or heavy chain variable regions can be synthesized chemically or by recombinant DNA methodologies. For example, the sequences of the antibodies can be cloned from hybridomas by conventional hybridization techniques or polymerase chain reaction (PCR) techniques, using the appropriate synthetic nucleic acid primers. The resulting DNA molecules encoding the variable regions of interest can be ligated to other appropriate nucleotide sequences, including, for example, constant region coding sequences, and expression control sequences, to produce conventional gene expression constructs (i.e., expression vectors) encoding the desired antibodies. Production of defined gene constructs is within routine skill in the art.

[0328] Nucleic acids encoding desired antibodies, fusion proteins, and/or antibody conjugates can be incorporated (ligated) into expression vectors, which can be introduced into host cells through conventional transfection or transformation techniques. Exemplary host cells are E. coli cells, Chinese hamster ovary (CHO) cells, human embryonic kidney 293 (HEK 293) cells, HeLa cells, baby hamster kidney (BHK) cells, monkey kidney cells (COS), human hepatocellular carcinoma cells (e.g., Hep G2), and myeloma cells that do not otherwise produce IgG protein. Transformed host cells can be grown under conditions that permit the host cells to express the genes that encode the immunoglobulin light and/or heavy chain variable regions.

[0329] Specific expression and purification conditions will vary depending upon the expression system employed. For example, if a gene is to be expressed in E. coli, it is first cloned into an expression vector by positioning the engineered gene downstream from a suitable bacterial promoter, e.g., Trp or Tac, and a prokaryotic signal sequence. The expressed protein may be secreted. The expressed protein may accumulate in refractile or inclusion bodies, which can be harvested after disruption of the cells by French press or sonication. The refractile bodies then are solubilized, and the protein may be refolded and/or cleaved by methods known in the art.

[0330] If the engineered gene is to be expressed in eukaryotic host cells, e.g., CHO cells, it is first inserted into an expression vector containing a suitable eukaryotic promoter, a secretion signal, a poly A sequence, and a stop codon. Optionally, the vector or gene construct may contain enhancers and introns. In embodiments involving antibodies or fusion proteins comprising an antibody or portion thereof, the expression vector optionally contains sequences encoding all or part of a constant region, enabling an entire, or a part of, a heavy or light chain to be expressed. The gene construct can be introduced into eukaryotic host cells using conventional techniques.

[0331] In certain embodiments, the host cells express an antibody, fusion protein and/or antibody conjugate comprising a sialidase and V_{L} or V_{H} fragments, V_{L}-V_{H} heterodimers, V_{H}-V_{L} or V_{L}-V_{H} single chain polypeptides, complete heavy or light immunoglobulin chains, or portions thereof, each of which may be attached to a moiety having another function (e.g., cytotoxicity). In some embodiments involving antibodies, fusion proteins and/or antibody conjugates, a host cell is transfected with a single vector expressing a polypeptide expressing a sialidase and an entire, or part of, a heavy chain (e.g., a heavy chain variable region) or a sialidase and a light chain (e.g., a light chain variable region), or a polypeptide expressing an entire, or part of, a heavy chain (e.g., a heavy chain variable region) or a light chain (e.g., a light chain variable region). In some embodiments, a host cell is transfected with a single vector encoding (a) a polypeptide comprising a heavy chain variable region and a polypeptide comprising a light chain variable region, or (b) an entire immunoglobulin heavy chain and an entire immunoglobulin light chain, wherein in (a) or in (b), the polypeptide may also comprise a sialidase. In some embodiments, a host cell is co-transfected with more than one expression vector (e.g., one expression vector expressing a polypeptide comprising an entire, or part of, a heavy chain or heavy chain variable region, optionally comprising a sialidase fused thereto, and another expression vector expressing a polypeptide comprising an entire, or part of, a light chain or light chain variable region, optionally comprising a sialidase fused thereto).

[0332] A polypeptide comprising an antibody or a fusion protein, e.g., an antibody or a fusion protein comprising an immunoglobulin heavy chain variable region and/or light chain variable region, can be produced by growing (culturing) a host cell transfected with an expression vector encoding such a variable region, under conditions that permit expression of the polypeptide. Following expression, the polypeptide can be harvested and purified or isolated using techniques known in the art, e.g., affinity tags such as glutathione-S-transferase (GST) or histidine tags.

[0333] In certain embodiments, an antibody, fusion protein, and/or antibody conjugate can be produced by growing (culturing) a host cell transfected with: (a) an expression vector that encodes a complete or partial immunoglobulin heavy chain, and a separate expression vector that encodes a complete or partial immunoglobulin light chain; or (b) a single expression vector that encodes both chains (e.g., complete or partial heavy and light chains), under conditions that permit expression of both chains. In embodiments in which a fusion protein and/or antibody conjugate is produced, the sialidase is fused to one or more of the chains. The intact antibody, fusion protein, and/or antibody conjugate can be harvested and purified or isolated using techniques known in the art, e.g., Protein A, Protein G, affinity tags such as glutathione-S-transferase (GST) or histidine tags. It is within ordinary skill in the art to express the heavy chain and the light chain from a single expression vector or from two separate expression vectors.

[0334] In certain embodiments, in order to express a protein, e.g., an antibody and/or a fusion protein, as a secreted protein, a native N-terminal signal sequence of the protein is replaced, e.g., with MDMRVPAQLLGLLLLWLPGARC (SEQ ID NO: 28). In certain embodiments, to express a protein, e.g., an antibody and/or a fusion protein, as a secreted protein, an N-terminal signal sequence, e.g., MDMRVPAQLLGLLLLWLPGARC (SEQ ID NO: 28), is added. Additional exemplary N-terminal signal sequences include signal sequences from interleukin-2, CD-5, IgG kappa light chain, trypsinogen, serum albumin, and prolactin. In certain embodiments, in order to express a protein, e.g., an antibody and/or a fusion protein, as a secreted protein, a C terminal lysosomal signal motif, e.g., YGTL (SEQ ID NO: 29) is removed.

[0335] Methods for reducing or eliminating the antigenicity of antibodies and antibody fragments are known in the art. When the antibodies are to be administered to a human, the antibodies preferably are “humanized” to reduce or eliminate antigenicity in humans. Preferably, each humanized antibody has the same or substantially the same affinity for the antigen as the non-humanized mouse antibody from which it was derived.

[0336] In one humanization approach, chimeric proteins are created in which mouse immunoglobulin constant regions are replaced with human immunoglobulin constant regions. See, e.g., Morrison et al., 1984, PROC. NAT. ACAD. SCI. 81:6851-6855, Neuberger et al., 1984, NATURE 312:604-608; U.S. Pat. No. 6,893,625 (Robinson); U.S. Pat. No. 5,500,362 (Robinson); and U.S. Pat. No. 4,816,567 (Cabilly).

[0337] In an approach known as CDR grafting, the CDRs of the light and heavy chain variable regions are grafted into frameworks from another species. For example, murine CDRs can be grafted into human FRs. In some embodiments, the CDRs of the light and heavy chain variable regions of an antibody are grafted into human FRs or consensus human FRs. To create consensus human FRs, FRs from several human heavy chain or light chain amino acid sequences are aligned to identify a consensus amino acid sequence. CDR grafting is described in U.S. Pat. No. 7,022,500 (Queen); U.S. Pat. No. 6,982,321 (Winter); U.S. Pat. No. 6,180,370 (Queen); U.S. Pat. No. 6,054,297 (Carter); U.S. Pat. No. 5,693,762 (Queen); U.S. Pat. No. 5,859,205 (Adair); U.S. Pat. No. 5,693,761 (Queen); U.S. Pat. No. 5,565,332 (Hoogenboom); U.S. Pat. No. 5,585,089 (Queen); U.S. Pat. No. 5,530,101 (Queen); Jones et al. (1986) NATURE 321: 522-525; Riechmann et al. (1988) NATURE 332: 323-327; Verhoeyen et al. (1988) SCIENCE 239: 1534-1536; and Winter (1998) FEBS LETT 430: 92-94.

[0338] In an approach called “SUPERHUMANIZATION™,” human CDR sequences are chosen from human germline genes, based on the structural similarity of the human CDRs to those of the mouse antibody to be humanized. See, e.g., U.S. Pat. No. 6,881,557 (Foote); and Tan et al., 2002, J. IMMUNOL. 169:1119-1125.

[0339] Other methods to reduce immunogenicity include “reshaping,” “hyperchimerization,” and “veneering/resurfacing.” See, e.g., Vaswami et al., 1998, ANNALS OF ALLERGY, ASTHMA, & IMMUNOL. 81:105; Roguska et al., 1996, PROT. ENGINEER 9:895-904; and U.S. Pat. No. 6,072,035 (Hardman). In the veneering/resurfacing approach, the surface accessible amino acid residues in the murine antibody are replaced by amino acid residues more frequently found at the same positions in a human antibody. This type of antibody resurfacing is described, e.g., in U.S. Pat. No. 5,639,641 (Pedersen).

[0340] Another approach for converting a mouse antibody into a form suitable for medical use in humans is known as ACTIVMAB™ technology (Vaccinex, Inc., Rochester, NY), which involves a vaccinia virus-based vector to express antibodies in mammalian cells. High levels of combinatorial diversity of IgG heavy and light chains can be produced. See, e.g., U.S. Pat. No. 6,706,477 (Zauderer); U.S. Pat. No. 6,800,442 (Zauderer); and U.S. Pat. No. 6,872,518 (Zauderer). Another approach for converting a mouse antibody into a form suitable for use in humans is technology practiced commercially by KaloBios Pharmaceuticals, Inc. (Palo Alto, CA). This technology involves the use of a proprietary human “acceptor” library to produce an “epitope focused” library for antibody selection. Another approach for modifying a mouse antibody into a form suitable for medical use in humans is HUMAN ENGINEERING™ technology, which is practiced commercially by XOMA (US) LLC. See, e.g., International (PCT) Publication No. WO 93/11794 and U.S. Pat. No. 5,766,886 (Studnicka); U.S. Pat. No. 5,770,196 (Studnicka); U.S. Pat. No. 5,821,123 (Studnicka); and U.S. Pat. No. 5,869,619 (Studnicka).

[0341] Any suitable approach, including any of the above approaches, can be used to reduce or eliminate human immunogenicity of an antibody.

[0342] In addition, it is possible to create fully human antibodies in mice. Fully human mAbs lacking any non-human sequences can be prepared from human immunoglobulin transgenic mice by techniques referenced in, e.g., Lonberg et al., NATURE 368:856-859, 1994; Fishwild et al., NATURE BIOTECHNOLOGY 14:845-851, 1996; and Mendez et al., NATURE GENETICS 15:146-156, 1997. Fully human monoclonal antibodies can also be prepared and optimized from phage display libraries by techniques referenced in, e.g., Knappik et al., J. MOL. BIOL. 296:57-86, 2000; and Krebs et al., J. IMMUNOL. METH. 254:67-84 2001).

[0343] The present invention encompasses antibody fragments, or fusion proteins comprising antibody fragments, which may be generated by traditional means, such as enzymatic digestion, or by recombinant techniques. For a review of certain antibody fragments, see Hudson et al. (2003) NAT. MED. 9:129-134.

[0344] Various techniques have been developed for the production of antibody fragments. Traditionally, these fragments were derived via proteolytic digestion of intact antibodies (see, e.g., Morimoto et al. (1992) JOURNAL OF BIOCHEMICAL AND BIOPHYSICAL METHODS 24:107-117; and Brennan et al. (1985) SCIENCE 229:81). However, these fragments can now be produced directly by recombinant host cells. Fab, Fv and ScFv antibody fragments can all be expressed in and secreted from E. coli, thus allowing the facile production of large amounts of these fragments. Antibody fragments can be isolated from the antibody phage libraries. Alternatively, Fab′-SH fragments can be directly recovered from E. coli and chemically coupled to form F(ab′)2 fragments (Carter et al. (1992) BIO/TECHNOLOGY 10:163-167). According to another approach, F(ab′)₂ fragments can be isolated directly from recombinant host cell culture. Fab and F(ab′)₂ fragments with increased in vivo half-life comprising salvage receptor binding epitope residues are described in U.S. Pat. No. 5,869,046. Other techniques for the production of antibody fragments will be apparent to the skilled practitioner. In certain embodiments, an antibody is a single chain Fv fragment (scFv). See U.S. Pat. Nos. 5,571,894 and 5,587,458.

[0345] Methods for making bispecific antibodies are known in the art. See Milstein and Cuello (1983) NATURE 305:537, International (PCT) Publication No. WO93/08829, and Traunecker et al. (1991) EMBO J., 10:3655. For further details of generating bispecific antibodies see, for example, Suresh et al. (1986) METHODS ENZYMOL. 121:210. Bispecific antibodies include cross-linked or “heteroconjugate” or “heterodimer” antibodies. For example, one of the antibodies in the heterodimer can be coupled to avidin, the other to biotin. Heterodimer antibodies may be made using any convenient cross-linking method. Suitable cross-linking agents are well known in the art, and are disclosed in U.S. Pat. No. 4,676,980, along with a number of cross-linking techniques.

[0346] Examples of heterodimeric or asymmetric IgG-like molecules include but are not limited to those obtained with the following technologies or using the following formats: Triomab/Quadroma, Knobs-into-Holes, CrossMabs, electrostatically-matched antibodies, LUZ-Y, Strand Exchange Engineered Domain body, Biclonic and DuoBody.

[0347] Advantages of using antibody fragments (e.g., F(ab) and F(ab′)2 fragments) include the elimination of non-specific binding between Fc portions of antibodies and Fc receptors on cells (such as macrophages, dendritic cells, neutrophils, NK cells and B cells). In addition, they may be able to penetrate tissues more efficiently due to their smaller size.

[0348] Heterodimeric antibodies, or asymmetric antibodies, allow for greater flexibility and new formats for attaching a variety of drugs to the antibody arms. One of the general formats for creating a heterodimeric antibody is the “knobs-into-holes” format. This format is specific to the heavy chain part of the constant region in antibodies. The “knobs” part is engineered by replacing a small amino acid with a larger one, which fits into a “hole”, which is engineered by replacing a large amino acid with a smaller one. What connects the “knobs” to the “holes” are the disulfide bonds between each chain. The “knobs-into-holes” shape facilitates antibody dependent cell mediated cytotoxicity. Single chain variable fragments (scFv) are connected to the variable domain of the heavy and light chain via a short linker peptide. The linker is rich in glycine, which gives it more flexibility, and serine/threonine, which gives it specificity. Two different scFv fragments can be connected together, via a hinge region, to the constant domain of the heavy chain or the constant domain of the light chain. This gives the antibody bispecificity, allowing for the binding specificities of two different antigens. The “knobs-into-holes” format enhances heterodimer formation but doesn't suppress homodimer formation.

[0349] Several approaches to support heterodimerization have been described, for example in International (PCT) Publication Nos. WO96/27011, WO98/050431, WO2007/110205, WO2007/147901, WO2009/089004, WO2010/129304, WO2011/90754, WO2011/143545, WO2012/058768, WO2013/157954, and WO2013/096291, and European Patent Publication No. EP1870459. Typically, in the approaches known in the art, the CH₃ domain of the first heavy chain and the CH₃ domain of the second heavy chain are both engineered in a complementary manner so that the heavy chain comprising one engineered CH₃ domain can no longer homodimerize with another heavy chain of the same structure (e.g., a CH₃-engineered first heavy chain can no longer homodimerize with another CH₃-engineered first heavy chain; and a CH₃-engineered second heavy chain can no longer homodimerize with another CH₃-engineered second heavy chain). Thereby the heavy chain comprising one engineered CH₃ domain is forced to heterodimerize with another heavy chain comprising the CH₃ domain, which is engineered in a complementary manner. As a result, the CH₃ domain of the first heavy chain and the CH₃ domain of the second heavy chain are engineered in a complementary manner by amino acid substitutions, such that the first heavy chain and the second heavy chain are forced to heterodimerize, whereas the first heavy chain and the second heavy chain can no longer homodimerize (e.g., for steric reasons).

### III. Pharmaceutical Compositions

[0350] For therapeutic use, an antibody, fusion protein, and/or antibody conjugate preferably is combined with a pharmaceutically acceptable carrier. The term “pharmaceutically acceptable” as used herein refers to those compounds, materials, compositions, and/or dosage forms which are, within the scope of sound medical judgment, suitable for use in contact with the tissues of human beings and animals without excessive toxicity, irritation, allergic response, or other problem or complication, commensurate with a reasonable benefit/risk ratio.

[0351] The term “pharmaceutically acceptable carrier” as used herein refers to buffers, carriers, and excipients suitable for use in contact with the tissues of human beings and animals without excessive toxicity, irritation, allergic response, or other problem or complication, commensurate with a reasonable benefit/risk ratio. Pharmaceutically acceptable carriers include any of the standard pharmaceutical carriers, such as a phosphate buffered saline solution, water, emulsions (e.g., such as an oil/water or water/oil emulsions), and various types of wetting agents. The compositions also can include stabilizers and preservatives. For examples of carriers, stabilizers and adjuvants, see, e.g., Martin, Remington's Pharmaceutical Sciences, 15th Ed., Mack Publ. Co., Easton, PA [1975]. Pharmaceutically acceptable carriers include buffers, solvents, dispersion media, coatings, isotonic and absorption delaying agents, and the like, that are compatible with pharmaceutical administration. The use of such media and agents for pharmaceutically active substances is known in the art.

[0352] In certain embodiments, a pharmaceutical composition may contain formulation materials for modifying, maintaining or preserving, for example, the pH, osmolarity, viscosity, clarity, color, isotonicity, odor, sterility, stability, rate of dissolution or release, adsorption or penetration of the composition. In such embodiments, suitable formulation materials include, but are not limited to, amino acids (such as glycine, glutamine, asparagine, arginine or lysine); antimicrobials; antioxidants (such as ascorbic acid, sodium sulfite or sodium hydrogen-sulfite); buffers (such as borate, bicarbonate, Tris-HCl, citrates, phosphates or other organic acids); bulking agents (such as mannitol or glycine); chelating agents (such as ethylenediamine tetraacetic acid (EDTA)); complexing agents (such as caffeine, polyvinylpyrrolidone, beta-cyclodextrin or hydroxypropyl-beta-cyclodextrin); fillers; monosaccharides; disaccharides; and other carbohydrates (such as glucose, mannose or dextrins); proteins (such as serum albumin, gelatin or immunoglobulins); coloring, flavoring and diluting agents; emulsifying agents; hydrophilic polymers (such as polyvinylpyrrolidone); low molecular weight polypeptides; salt-forming counterions (such as sodium); preservatives (such as benzalkonium chloride, benzoic acid, salicylic acid, thimerosal, phenethyl alcohol, methylparaben, propylparaben, chlorhexidine, sorbic acid or hydrogen peroxide); solvents (such as glycerin, propylene glycol or polyethylene glycol); sugar alcohols (such as mannitol or sorbitol); suspending agents; surfactants or wetting agents (such as pluronics, PEG, sorbitan esters, polysorbates such as polysorbate 20, polysorbate, triton, tromethamine, lecithin, cholesterol, tyloxapal); stability enhancing agents (such as sucrose or sorbitol); tonicity enhancing agents (such as alkali metal halides, preferably sodium or potassium chloride, mannitol sorbitol); delivery vehicles; diluents; excipients and/or pharmaceutical adjuvants (see, Remington's Pharmaceutical Sciences, 18th ed. (Mack Publishing Company, 1990).

[0353] In certain embodiments, a pharmaceutical composition may contain nanoparticles, e.g., polymeric nanoparticles, liposomes, or micelles (See Anselmo et al. (2016) BIOENG. TRANSL. MED. 1: 10-29).

[0354] In certain embodiments, a pharmaceutical composition may contain a sustained- or controlled-delivery formulation. Techniques for formulating sustained- or controlled-delivery means, such as liposome carriers, bio-erodible microparticles or porous beads and depot injections, are also known to those skilled in the art. Sustained-release preparations may include, e.g., porous polymeric microparticles or semipermeable polymer matrices in the form of shaped articles, e.g., films, or microcapsules. Sustained release matrices may include polyesters, hydrogels, polylactides, copolymers of L-glutamic acid and gamma ethyl-L-glutamate, poly (2-hydroxyethyl-inethacrylate), ethylene vinyl acetate, or poly-D(−)-3-hydroxybutyric acid. Sustained release compositions may also include liposomes that can be prepared by any of several methods known in the art.

[0355] Pharmaceutical compositions containing an antibody, sialidase fusion protein, or an antibody conjugate disclosed herein can be presented in a dosage unit form and can be prepared by any suitable method. A pharmaceutical composition should be formulated to be compatible with its intended route of administration. Examples of routes of administration are intravenous (IV), intradermal, inhalation, transdermal, topical, transmucosal, intrathecal and rectal administration. In certain embodiments, an antibody, sialidase fusion protein, or an antibody conjugate disclosed herein is administered by IV infusion. In certain embodiments, an antibody, sialidase fusion protein, or an antibody conjugate disclosed herein is administered by intratumoral injection. Useful formulations can be prepared by methods known in the pharmaceutical art. For example, see Remington's Pharmaceutical Sciences, 18th ed. (Mack Publishing Company, 1990). Formulation components suitable for parenteral administration include a sterile diluent such as water for injection, saline solution, fixed oils, polyethylene glycols, glycerin, propylene glycol or other synthetic solvents; antibacterial agents such as benzyl alcohol or methyl parabens; antioxidants such as ascorbic acid or sodium bisulfite; chelating agents such as EDTA; buffers such as acetates, citrates or phosphates; and agents for the adjustment of tonicity such as sodium chloride or dextrose.

[0356] For intravenous administration, suitable carriers include physiological saline, bacteriostatic water, Cremophor EL™ (BASF, Parsippany, NJ) or phosphate buffered saline (PBS). The carrier should be stable under the conditions of manufacture and storage, and should be preserved against microorganisms. The carrier can be a solvent or dispersion medium containing, for example, water, ethanol, polyol (for example, glycerol, propylene glycol, and liquid polyethylene glycol), and suitable mixtures thereof.

[0357] In certain embodiments, a pharmaceutical composition may contain a stabilizing agent. In certain embodiments, the stabilizing agent is a cation, such as a divalent cation. In certain embodiments, the cation is calcium or magnesium. The cation can be in the form of a salt, such as calcium chloride (CaCl₂) or magnesium chloride (MgCl₂).

[0358] In certain embodiments, the stabilizing agent is present in an amount from about 0.05 mM to about 5 mM. For example, the stabilizing agent may be present in an amount of from about 0.05 mM to about 4 mM, from about 0.05 mM to about 3 mM, from about 0.05 mM to about 2 mM, from about 0.05 mM to about 1 mM, from about 0.05 mM to about 0.5 mM, from about 0.5 mM to about 4 mM, from about 0.5 mM to about 3 mM, from about 0.5 mM to about 2 mM, from about 0.5 mM to about 1 mM, from about 1 mM to about 4 mM, from about 1 mM to about 3 mM, of from about 1 mM to about 2 mM.

[0359] Pharmaceutical formulations preferably are sterile. Sterilization can be accomplished by any suitable method, e.g., filtration through sterile filtration membranes. Where the composition is lyophilized, filter sterilization can be conducted prior to or following lyophilization and reconstitution.

[0360] The compositions described herein may be administered locally or systemically. Administration will generally be parenteral administration. In a preferred embodiment, the pharmaceutical composition is administered subcutaneously and in an even more preferred embodiment intravenously. Preparations for parenteral administration include sterile aqueous or non-aqueous solutions, suspensions, and emulsions.

[0361] Generally, a therapeutically effective amount of active component, for example, an antibody, fusion protein, and/or antibody conjugate, is in the range of 0.1 mg/kg to 100 mg/kg, e.g., 1 mg/kg to 100 mg/kg, 1 mg/kg to 10 mg/kg. The amount administered will depend on variables such as the type and extent of disease or indication to be treated, the overall health of the patient, the in vivo potency of the antibody, the pharmaceutical formulation, and the route of administration. The initial dosage can be increased beyond the upper level in order to rapidly achieve the desired blood-level or tissue-level. Alternatively, the initial dosage can be smaller than the optimum, and the daily dosage may be progressively increased during the course of treatment. Human dosage can be optimized, e.g., in a conventional Phase I dose escalation study designed to run from 0.5 mg/kg to 20 mg/kg. Dosing frequency can vary, depending on factors such as route of administration, dosage amount, serum half-life of the antibody, fusion protein, and/or antibody conjugate, and the disease being treated. Exemplary dosing frequencies are once per day, once per week and once every two weeks. A preferred route of administration is parenteral, e.g., intravenous infusion. In certain embodiments, an antibody, fusion protein, and/or antibody conjugate is lyophilized, and then reconstituted in buffered saline, at the time of administration.

### IV. Therapeutic Uses

[0362] The compositions and methods disclosed herein can be used to treat various forms of cancer in a subject or inhibit cancer growth in a subject. The invention provides a method of treating a cancer in a subject. The method comprises administering to the subject an effective amount of an anti-PD-L1 antibody, a sialidase anti-PD-L1 fusion protein, and/or antibody conjugate, e.g., an antibody, fusion protein, or antibody conjugate disclosed herein, either alone or in a combination with another therapeutic agent to treat the cancer in the subject. The term “effective amount” as used herein refers to the amount of an active agent (e.g., an antibody, fusion protein, or antibody conjugate according to the present invention) sufficient to effect beneficial or desired results. An effective amount can be administered in one or more administrations, applications or dosages and is not intended to be limited to a particular formulation or administration route.

[0363] As used herein, “treat”, “treating” and “treatment” mean the treatment of a disease in a subject, e.g., in a human. This includes: (a) inhibiting the disease, i.e., arresting its development; and (b) relieving the disease, i.e., causing regression of the disease state. As used herein, the terms “subject” and “patient” refer to an organism to be treated by the methods and compositions described herein. Such organisms preferably include, but are not limited to, mammals (e.g., murines, simians, equines, bovines, porcines, canines, felines, and the like), and more preferably includes humans.

[0364] Examples of cancers include solid tumors, soft tissue tumors, hematopoietic tumors and metastatic lesions. Examples of hematopoietic tumors include, leukemia, acute leukemia, acute lymphoblastic leukemia (ALL), B-cell, T-cell or FAB ALL, acute myeloid leukemia (AML), chronic myelocytic leukemia (CIVIL), chronic lymphocytic leukemia (CLL), e.g., transformed CLL, diffuse large B-cell lymphomas (DLBCL), follicular lymphoma, hairy cell leukemia, myelodyplastic syndrome (MDS), a lymphoma, Hodgkin's disease, a malignant lymphoma, non-Hodgkin's lymphoma, Burkitt's lymphoma, multiple myeloma, or Richter's Syndrome (Richter's Transformation). Examples of solid tumors include malignancies, e.g., sarcomas, adenocarcinomas, and carcinomas, of the various organ systems, such as those affecting head and neck (including pharynx), thyroid, lung (small cell or non-small cell lung carcinoma (NSCLC)), breast, lymphoid, gastrointestinal (e.g., oral, esophageal, stomach, liver, pancreas, small intestine, colon and rectum, anal canal), genitals and genitourinary tract (e.g., renal, urothelial, bladder, ovarian, uterine, cervical, endometrial, prostate, testicular), CNS (e.g., neural or glial cells, e.g., neuroblastoma or glioma), or skin (e.g., melanoma and metastatic Merkel cell carcinoma (MCC)).

[0365] In certain embodiments the cancer is an epithelial cancer, e.g., an epithelial cancer that upregulates the expression of sialylated glycans. Exemplary epithelial cancers include, but are not limited to, endometrial cancer, colon cancer, ovarian cancer, cervical cancer, vulvar cancer, uterine cancer or fallopian tube cancer, breast cancer, prostate cancer, lung cancer, pancreatic cancer, urinary cancer, bladder cancer, head and neck cancer, oral cancer and liver cancer. Epithelial cancers also include carcinomas, for example, acinar carcinoma, acinous carcinoma, adenocystic carcinoma, adenoid cystic carcinoma, carcinoma adenomatosum, carcinoma of adrenal cortex, alveolar carcinoma, alveolar cell carcinoma, basal cell carcinoma, carcinoma basocellulare, basaloid carcinoma, baso squamous cell carcinoma, bronchioalveolar carcinoma, bronchiolar carcinoma, bronchogenic carcinoma, cerebriform carcinoma, cholangiocellular carcinoma, chorionic carcinoma, colloid carcinoma, comedo carcinoma, corpus carcinoma, cribriform carcinoma, carcinoma en cuirasse, carcinoma cutaneum, cylindrical carcinoma, cylindrical cell carcinoma, duct carcinoma, carcinoma durum, embryonal carcinoma, encephaloid carcinoma, epiermoid carcinoma, carcinoma epitheliale adenoides, exophytic carcinoma, carcinoma ex ulcere, carcinoma fibrosum, gelatiniforni carcinoma, gelatinous carcinoma, giant cell carcinoma, carcinoma gigantocellulare, glandular carcinoma, granulosa cell carcinoma, hair-matrix carcinoma, hematoid carcinoma, hepatocellular carcinoma, Hurthle cell carcinoma, hyaline carcinoma, hypemephroid carcinoma, infantile embryonal carcinoma, carcinoma in situ, intraepidermal carcinoma, intraepithelial carcinoma, Krompecher's carcinoma, Kulchitzky-cell carcinoma, large-cell carcinoma, lenticular carcinoma, carcinoma lenticulare, lipomatous carcinoma, lymphoepithelial carcinoma, carcinoma medullare, medullary carcinoma, melanotic carcinoma, carcinoma molle, mucinous carcinoma, carcinoma muciparum, carcinoma mucocellulare, mucoepidermoid carcinoma, carcinoma mucosum, mucous carcinoma, carcinoma myxomatodes, nasopharyngeal carcinoma, oat cell carcinoma, carcinoma ossificans, osteoid carcinoma, papillary carcinoma, periportal carcinoma, preinvasive carcinoma, prickle cell carcinoma, pultaceous carcinoma, renal cell carcinoma of kidney, reserve cell carcinoma, carcinoma sarcomatodes, schneiderian carcinoma, scirrhous carcinoma, carcinoma scroti, signet-ring cell carcinoma, carcinoma simplex, small-cell carcinoma, solanoid carcinoma, spheroidal cell carcinoma, spindle cell carcinoma, carcinoma spongiosum, squamous carcinoma, squamous cell carcinoma, string carcinoma, carcinoma telangiectaticum, carcinoma telangiectodes, transitional cell carcinoma, carcinoma tuberosum, tuberous carcinoma, verrucous carcinoma, and carcinoma villosum.

[0366] In certain embodiments the cancer is selected from lung bronchioloalveolar carcinoma (BAC), bladder cancer, a female genital tract malignancy (e.g., uterine serous carcinoma, endometrial carcinoma, vulvar squamous cell carcinoma, and uterine sarcoma), an ovarian surface epithelial carcinoma (e.g., clear cell carcinoma of the ovary, epithelial ovarian cancer, fallopian tube cancer, and primary peritoneal cancer), breast carcinoma, non-small cell lung cancer (NSCLC), a male genital tract malignancy (e.g., testicular cancer), retroperitoneal or peritoneal carcinoma, gastroesophageal adenocarcinoma, esophagogastric junction carcinoma, liver hepatocellular carcinoma, esophageal and esophagogastric junction carcinoma, cervical cancer, cholangiocarcinoma, pancreatic adenocarcinoma, extrahepatic bile duct adenocarcinoma, a small intestinal malignancy, gastric adenocarcinoma, cancer of unknown primary (CUP), colorectal adenocarcinoma, esophageal carcinoma, prostatic adenocarcinoma, kidney cancer, head and neck squamous carcinoma, thymic carcinoma, non-melanoma skin cancer, thyroid carcinoma (e.g., papillary carcinoma), a head and neck cancer, anal carcinoma, non-epithelial ovarian cancer (non-EOC), metastatic urothelial carcinoma (UC), uveal melanoma, malignant pleural mesothelioma, small cell lung cancer (SCLC), a central nervous system cancer, a neuroendocrine tumor, and a soft tissue tumor.

[0367] In certain embodiments, the cancer is melanoma, non-small cell lung cancer, colon cancer, breast cancer, bladder cancer, or kidney cancer.

[0368] In certain embodiments, the cancer is an adenocarcinoma. In certain embodiments, the cancer is a metastatic cancer. In certain embodiments, the cancer is a refractory cancer.

[0369] In certain embodiments, the cancer is resistant to or non-responsive to treatment with an antibody, e.g., an antibody with ADCC activity, e.g., avelumab.

[0370] In certain embodiments, the cancer is a PD-L1-expressing cancer, e.g., the cancer comprises cells that express PD-L1. An analysis of 196 tumor specimens from patients with renal cell carcinoma found that high tumor expression of PD-L1 was associated with increased tumor aggressiveness and a 4.5-fold increased risk of death. High expression of PD-L1 is associated with reduced numbers of tumor infiltrating lymphocytes and poor prognosis. In certain embodiments, the PD-L1 status of a cancer can be determined using immunohistochemistry staining protocols, such as DAKO 22C3 and VENTANA SP142 FDA approved protocols, which are used as companion diagnostics for anti-PD-L1 antibodies pembrolizumab, durvalumab, atezolizumab, and avelumab.

[0371] The methods and compositions described herein can be used alone or in combination with other therapeutic agents and/or modalities. The term administered “in combination,” as used herein, is understood to mean that two (or more) different treatments are delivered to the subject during the course of the subject's affliction with the disorder, such that the effects of the treatments on the patient overlap at a point in time. In certain embodiments, the delivery of one treatment is still occurring when the delivery of the second begins, so that there is overlap in terms of administration. This is sometimes referred to herein as “simultaneous” or “concurrent delivery.” In other embodiments, the delivery of one treatment ends before the delivery of the other treatment begins. In certain embodiments of either case, the treatment is more effective because of combined administration. For example, the second treatment is more effective, e.g., an equivalent effect is seen with less of the second treatment, or the second treatment reduces symptoms to a greater extent, than would be seen if the second treatment were administered in the absence of the first treatment, or the analogous situation is seen with the first treatment. In certain embodiments, delivery is such that the reduction in a symptom, or other parameter related to the disorder is greater than what would be observed with one treatment delivered in the absence of the other. The effect of the two treatments can be partially additive, wholly additive, or greater than additive. The delivery can be such that an effect of the first treatment delivered is still detectable when the second is delivered.

[0372] In certain embodiments, a method or composition described herein, is administered in combination with one or more additional therapies, e.g., surgery, radiation therapy, or administration of another therapeutic preparation. In certain embodiments, the additional therapy may include chemotherapy, e.g., a cytotoxic agent. In certain embodiments the additional therapy may include a targeted therapy, e.g., a tyrosine kinase inhibitor, a proteasome inhibitor, or a protease inhibitor. In certain embodiments, the additional therapy may include an anti-inflammatory, anti-angiogenic, anti-fibrotic, or anti-proliferative compound, e.g., a steroid, a biologic immunomodulator, a monoclonal antibody, an antibody fragment, an aptamer, an siRNA, an antisense molecule, a fusion protein, a cytokine, a cytokine receptor, a bronchodilator, a statin, an anti-inflammatory agent (e.g., methotrexate), or an NSAID. In certain embodiments, the additional therapy may include a combination of therapeutics of different classes.

[0373] In certain embodiments, a method or composition described herein is administered in combination with a second checkpoint inhibitor. The checkpoint inhibitor may, for example, be selected from a PD-1 antagonist, a second PD-L1 antagonist, CTLA-4 antagonist, adenosine A2A receptor antagonist, B7-H3 antagonist, B7-H4 antagonist, BTLA antagonist, KIR antagonist, LAG3 antagonist, TIM-3 antagonist, VISTA antagonist or TIGIT antagonist.

[0374] In certain embodiments, the checkpoint inhibitor is a PD-1 or a second PD-L1 inhibitor. PD-1 is a receptor present on the surface of T-cells that serves as an immune system checkpoint that inhibits or otherwise modulates T-cell activity at the appropriate time to prevent an overactive immune response. Cancer cells, however, can take advantage of this checkpoint by expressing ligands, for example, PD-L1, that interact with PD-1 on the surface of T-cells to shut down or modulate T-cell activity. Exemplary PD-1/PD-L1 based immune checkpoint inhibitors include antibody based therapeutics. Exemplary treatment methods that employ PD-1/PD-L1 based immune checkpoint inhibition are described in U.S. Pat. Nos. 8,728,474 and 9,073,994, and EP Patent No. 1537878B1, and, for example, include the use of anti-PD-1 antibodies. Exemplary anti-PD-1 antibodies are described, for example, in U.S. Pat. Nos. 8,952,136, 8,779,105, 8,008,449, 8,741,295, 9,205,148, 9,181,342, 9,102,728, 9,102,727, 8,952,136, 8,927,697, 8,900,587, 8,735,553, and 7,488,802. Exemplary anti-PD-1 antibodies include, for example, nivolumab (Opdivo®, Bristol-Myers Squibb Co.), pembrolizumab (Keytruda®, Merck Sharp & Dohme Corp.), PDR001 (Novartis Pharmaceuticals), and pidilizumab (CT-011, Cure Tech). Exemplary anti-PD-L1 antibodies are described, for example, in U.S. Pat. Nos. 9,273,135, 7,943,743, 9,175,082, 8,741,295, 8,552,154, and 8,217,149. Exemplary anti-PD-L1 antibodies include, atezolizumab (Tecentriq®, Genentech), durvalumab (AstraZeneca), MEDI4736, avelumab, and BMS 936559 (Bristol Myers Squibb Co.).

[0375] In certain embodiments, a method or composition described herein is administered in combination with a CTLA-4 inhibitor. In the CTLA-4 pathway, the interaction of CTLA-4 on a T-cell with its ligands (e.g., CD80, also known as B7-1, and CD86) on the surface of an antigen presenting cells (rather than cancer cells) leads to T-cell inhibition. Exemplary CTLA-4 based immune checkpoint inhibition methods are described in U.S. Pat. Nos. 5,811,097, 5,855,887, 6,051,227. Exemplary anti-CTLA-4 antibodies are described in U.S. Pat. Nos. 6,984,720, 6,682,736, 7,311,910; 7,307,064, 7,109,003, 7,132,281, 6,207,156, 7,807,797, 7,824,679, 8,143,379, 8,263,073, 8,318,916, 8,017,114, 8,784,815, and 8,883,984, International (PCT) Publication Nos. WO98/42752, WO00/37504, and WO01/14424, and European Patent No. EP 1212422 B1. Exemplary CTLA-4 antibodies include ipilimumab or tremelimumab.

[0376] In certain embodiments, a method or composition described herein is administered in combination with a CTLA-4 inhibitor, e.g., a CTLA-4 inhibitor disclosed herein.

[0377] In certain embodiments, a method or composition described herein is administered in combination with an IDO inhibitor. Exemplary IDO inhibitors include 1-methyl-D-tryptophan (known as indoximod), epacadostat (INCB24360), navoximod (GDC-0919), and BMS-986205.

[0378] Exemplary cytotoxic agents that can be administered in combination with a method or composition described herein include, for example, antimicrotubule agents, topoisomerase inhibitors, antimetabolites, protein synthesis and degradation inhibitors, mitotic inhibitors, alkylating agents, platinating agents, inhibitors of nucleic acid synthesis, histone deacetylase inhibitors (HDAC inhibitors, e.g., vorinostat (SAHA, MK0683), entinostat (MS-275), panobinostat (LBH589), trichostatin A (TSA), mocetinostat (MGCD0103), belinostat (PXD101), romidepsin (FK228, depsipeptide)), DNA methyltransferase inhibitors, nitrogen mustards, nitrosoureas, ethylenimines, alkyl sulfonates, triazenes, folate analogs, nucleoside analogs, ribonucleotide reductase inhibitors, vinca alkaloids, taxanes, epothilones, intercalating agents, agents capable of interfering with a signal transduction pathway, agents that promote apoptosis and radiation, or antibody molecule conjugates that bind surface proteins to deliver a toxic agent. In one embodiment, the cytotoxic agent that can be administered with a method or composition described herein is a platinum-based agent (such as cisplatin), cyclophosphamide, dacarbazine, methotrexate, fluorouracil, gemcitabine, capecitabine, hydroxyurea, topotecan, irinotecan, azacytidine, vorinostat, ixabepilone, bortezomib, taxanes (e.g., paclitaxel or docetaxel), cytochalasin B, gramicidin D, ethidium bromide, emetine, mitomycin, etoposide, tenoposide, vincristine, vinblastine, vinorelbine, colchicin, anthracyclines (e.g., doxorubicin or epirubicin) daunorubicin, dihydroxy anthracin dione, mitoxantrone, mithramycin, actinomycin D, adriamycin, 1-dehydrotestosterone, glucocorticoids, procaine, tetracaine, lidocaine, propranolol, puromycin, ricin, or maytansinoids.

[0379] The invention also provides a method of increasing the expression of HLA-DR, CD86, CD83, IFN-γ, IL-1b, IL-6, TNFα, IL-17A, IL-2, or IL-6 in a cell, tissue, or subject. The method comprises contacting the cell, tissue, or subject with an effective amount of an antibody, fusion protein, and/or antibody conjugate, e.g., an antibody, fusion protein, or antibody conjugate disclosed herein. In certain embodiments, the cell is selected from a dendritic cell and a peripheral blood mononuclear cell (PBMC).

[0380] In certain embodiments, expression of HLA-DR, CD86, CD83, IFN-γ, IL-1b, IL-6, TNFα, IL-17A, IL-2, or IL-6 in the cell, tissue, or subject is increased by at least about 10%, at least about 20%, at least about 50%, at least about 75%, at least about 100%, at least about 150%, at least about 200%, at least about 250%, at least about 300%, at least about 400%, at least about 500%, at least about 600%, at least about 700%, at least about 800%, at least about 900%, or at least about 1,000%, relative to a similar or otherwise identical cell or tissue that has not been contacted with the antibody, fusion protein, or antibody conjugate. Gene expression may be measured by any suitable method known in the art, for example, by ELISA, or by Luminex multiplex assays.

[0381] The invention also provides a method of promoting infiltration of immune cells into a tumor in a subject in need thereof. The method comprises administering to the subject an effective amount of an antibody, fusion protein, and/or antibody conjugate, e.g., an antibody, fusion protein, or antibody conjugate disclosed herein. In certain embodiments, the immune cells are T-cells, e.g., CD4+ and/or CD8+ T-cells, e.g., CD69⁺CD8⁺ and/or GzmB⁺CD8⁺ T-cells. In certain embodiments, the immune cells are natural killer (NK) cells.

[0382] In certain embodiments, the infiltration of immune cells into the tumor in the subject is increased by at least about 10%, at least about 20%, at least about 50%, at least about 75%, at least about 100%, at least about 150%, at least about 200%, at least about 250%, at least about 300%, at least about 400%, at least about 500%, at least about 600%, at least about 700%, at least about 800%, at least about 900%, or at least about 1,000%, relative to a similar or otherwise identical tumor and/or subject that has not been administered the antibody, fusion protein, or antibody conjugate. Infiltration of immune cells into a tumor may be measured by any suitable method known in the art, for example, antibody staining.

[0383] The invention also provides a method of increasing the number of circulating natural killer (NK) cells in a subject in need thereof. The method comprises administering to the subject an effective amount of an antibody, fusion protein, and/or antibody conjugate, e.g., an antibody, fusion protein, or antibody conjugate disclosed herein, so as to increase the number of circulating NK cells relative to prior to administration of the antibody, fusion protein, antibody conjugate or pharmaceutical composition.

[0384] In certain embodiments, the number of circulating NK cells in the subject is increased by at least about 10%, at least about 20%, at least about 50%, at least about 75%, at least about 100%, at least about 150%, at least about 200%, at least about 250%, at least about 300%, at least about 400%, at least about 500%, at least about 600%, at least about 700%, at least about 800%, at least about 900%, or at least about 1,000%, relative to a similar or otherwise identical subject that has not been administered the antibody, fusion protein, or antibody conjugate. Circulating NK cells in a subject may be measured by any suitable method known in the art, for example, antibody staining.

[0385] The invention also provides a method of increasing the number of T-cells in the draining lymph node in a subject in need thereof. The method comprises administering to the subject an effective amount of an antibody, fusion protein, and/or antibody conjugate, e.g., an antibody, fusion protein, or antibody conjugate disclosed herein, so as to increase the number of T-cells in the draining lymph node relative to prior to administration of the antibody, fusion protein, antibody conjugate, or pharmaceutical composition. In certain embodiments, the immune cells are T-cells, e.g., CD4+ and/or CD8+ T-cells.

[0386] In certain embodiments, the number of T-cells in the draining lymph node in the subject is increased by at least about 10%, at least about 20%, at least about 50%, at least about 75%, at least about 100%, at least about 150%, at least about 200%, at least about 250%, at least about 300%, at least about 400%, at least about 500%, at least about 600%, at least about 700%, at least about 800%, at least about 900%, or at least about 1,000%, relative to a similar or otherwise identical subject that has not been administered the antibody, fusion protein, or antibody conjugate, or pharmaceutical composition. T-cells in the draining lymph node in a subject may be measured by any suitable method known in the art, for example, antibody staining.

[0387] The invention also provides a method of increasing expression of Cd3, Cd4, Cd8, Cd274, Ctla4, Icos, Pdcd1, Lag3, Il6, Il1b, Il2, Ifng, Ifna1, Mx1, Gzmb, Cxcl9, Cxcl12, and/or Ccl5 in a cell, tissue, or subject. The method comprises contacting the cell, tissue, or subject with an effective amount of an antibody, fusion protein, and/or antibody conjugate, e.g., an antibody, fusion protein, or antibody conjugate disclosed herein, so as to increase the expression of Cd3, Cd4, Cd8, Cd274, Ctla4, Icos, Pdcd1, Lag3, Il6, Il1b, Il2, Ifng, Ifna1, Mx1, Gzmb, Cxcl9, Cxcl12, and/or Ccl5 relative to the cell, tissue or subject prior to contact with the antibody, fusion protein, or antibody conjugate.

[0388] In certain embodiments, expression of Cd3, Cd4, Cd8, Cd274, Ctla4, Icos, Pdcd1, Lag3, Il6, Il1b, Il2, Ifng, Ifna1, Mx1, Gzmb, Cxcl9, Cxcl12, and/or Ccl5 in the cell, tissue, or subject is increased by at least about 10%, at least about 20%, at least about 50%, at least about 75%, at least about 100%, at least about 150%, at least about 200%, at least about 250%, at least about 300%, at least about 400%, at least about 500%, at least about 600%, at least about 700%, at least about 800%, at least about 900%, or at least about 1,000%, relative to a similar or otherwise identical cell, tissue, or subject that has not been contacted with the antibody, fusion protein, or antibody conjugate. Gene expression may be measured by any suitable method known in the art, for example, by ELISA, Luminex multiplex assays, or Nanostring technology.

[0389] The invention also provides a method of removing sialic acid from a cell or tissue. The method comprises contacting the cell or tissue with an effective amount of a fusion protein and/or antibody conjugate, e.g., a fusion protein or antibody conjugate disclosed herein. The invention also provides a method of removing sialic acid from a cell in a subject, the method comprising administering to the subject an effective amount of a pharmaceutical composition comprising a fusion protein and/or antibody conjugate, e.g., a fusion protein or antibody conjugate disclosed herein, thereby to remove sialic acid from the cell.

[0390] In certain embodiments, the cell is tumor cell, dendritic cell (DC) or monocyte. In certain embodiments, the cell is a monocyte, and the method results in increased expression of an MHC-II molecule (e.g., HLA-DR) on the monocyte. In certain embodiments, expression of an MHC-II molecule in the cell or tissue is increased by at least about 10%, at least about 20%, at least about 50%, at least about 75%, at least about 100%, at least about 150%, at least about 200%, at least about 250%, at least about 300%, at least about 400%, at least about 500%, at least about 600%, at least about 700%, at least about 800%, at least about 900%, or at least about 1,000%, relative to a similar or otherwise identical cell or tissue that has not been contacted with the fusion protein and/or antibody conjugate. Gene expression may be measured by any suitable method known in the art, for example, by ELISA, by Luminex multiplex assays, or by flow cytometry.

[0391] The invention also provides a method of enhancing phagocytosis of a tumor cell. The method comprises contacting the tumor cell with a fusion protein and/or antibody conjugate, e.g., a fusion protein or antibody conjugate disclosed herein, in an amount effective to remove sialic acid from the tumor cell, thereby enhancing phagocytosis of the tumor cell. In certain embodiments, the disclosure relates to a method of increasing phagocytosis of a tumor cell in a subject, the method comprising administering to the subject an effective amount of a pharmaceutical composition a fusion protein and/or antibody conjugate, e.g., a fusion protein or antibody conjugate disclosed herein, in an amount effective to remove sialic acid from the tumor cell, thereby to increase phagocytosis of the tumor cell.

[0392] In certain embodiments, phagocytosis is increased by at least about 10%, at least about 20%, at least about 50%, at least about 75%, at least about 100%, at least about 150%, at least about 200%, at least about 250%, at least about 300%, at least about 400%, at least about 500%, at least about 600%, at least about 700%, at least about 800%, at least about 900%, or at least about 1,000%, relative to a similar or otherwise identical tumor cell or population of tumor cells that has not or have not been contacted with the fusion protein and/or antibody conjugate. Phagocytosis may be measured by any suitable method known in the art.

[0393] The invention also provides a method of activating a dendritic cell (DC). The method comprises contacting the DC with a tumor cell that has been treated with a fusion protein and/or antibody conjugate, e.g., a fusion protein or antibody conjugate disclosed herein. In certain embodiments, the disclosure relates to a method of activating a dendritic cell (DC) or a population of DCs in a subject, the method comprising administering to the subject an amount of a pharmaceutical composition comprising a fusion protein and/or antibody conjugate, e.g., a fusion protein or antibody conjugate disclosed herein, effective to remove sialic acid from a tumor cell in the subject, thereby to activate the DC or the population of DCs in the subject.

[0394] In certain embodiments, activation of the DC or a population of DCs is increased by at least about 10%, at least about 20%, at least about 50%, at least about 75%, at least about 100%, at least about 150%, at least about 200%, at least about 250%, at least about 300%, at least about 400%, at least about 500%, at least about 600%, at least about 700%, at least about 800%, at least about 900%, or at least about 1,000%, relative to a similar or otherwise identical DC or population of DCs that has not or have not been contacted with a tumor cell that has been treated with the fusion protein and/or antibody conjugate. Activation may be measured by any suitable method known in the art.

[0395] The invention also provides a method of reducing Siglec-15 binding activity, thereby to increase anti-tumor activity in a tumor microenvironment, the method comprising contacting a T cell with an antibody, fusion protein, and/or antibody conjugate, e.g., an antibody, fusion protein, or antibody conjugate disclosed herein. In certain embodiments, the disclosure relates to a method of reducing Siglec-15 binding activity, thereby to increase anti-tumor activity in a tumor microenvironment of a patient, the method comprising administering to the subject an effective amount of a pharmaceutical composition comprising an antibody, fusion protein, and/or antibody conjugate, e.g., an antibody, fusion protein, or antibody conjugate disclosed herein, thereby to increase anti-tumor activity (e.g., T cell activity) in the subject.

[0396] In certain embodiments, Siglec-15 binding activity is reduced by at least about 10%, at least about 20%, at least about 50%, at least about 75%, or about 100%, relative to Siglec-15 that has not or have not been contacted with the antibody, fusion protein, antibody conjugate, and/or pharmaceutical composition. Binding may be measured by any suitable method known in the art.

[0397] Throughout the description, where compositions are described as having, including, or comprising specific components, or where processes and methods are described as having, including, or comprising specific steps, it is contemplated that, additionally, there are compositions of the present invention that consist essentially of, or consist of, the recited components, and that there are processes and methods according to the present invention that consist essentially of, or consist of, the recited processing steps.

[0398] In the application, where an element or component is said to be included in and/or selected from a list of recited elements or components, it should be understood that the element or component can be any one of the recited elements or components, or the element or component can be selected from a group consisting of two or more of the recited elements or components.

[0399] Further, it should be understood that elements and/or features of a composition or a method described herein can be combined in a variety of ways without departing from the spirit and scope of the present invention, whether explicit or implicit herein. For example, where reference is made to a particular compound, that compound can be used in various embodiments of compositions of the present invention and/or in methods of the present invention, unless otherwise understood from the context. In other words, within this application, embodiments have been described and depicted in a way that enables a clear and concise application to be written and drawn, but it is intended and will be appreciated that embodiments may be variously combined or separated without parting from the present teachings and invention(s). For example, it will be appreciated that all features described and depicted herein can be applicable to all aspects of the invention(s) described and depicted herein.

[0400] It should be understood that the expression “at least one of” includes individually each of the recited objects after the expression and the various combinations of two or more of the recited objects unless otherwise understood from the context and use. The expression “and/or” in connection with three or more recited objects should be understood to have the same meaning unless otherwise understood from the context.

[0401] The use of the term “include,” “includes,” “including,” “have,” “has,” “having,” “contain,” “contains,” or “containing,” including grammatical equivalents thereof, should be understood generally as open-ended and non-limiting, for example, not excluding additional unrecited elements or steps, unless otherwise specifically stated or understood from the context.

[0402] Where the use of the term “about” is before a quantitative value, the present invention also includes the specific quantitative value itself, unless specifically stated otherwise. As used herein, the term “about” refers to a ±10% variation from the nominal value unless otherwise indicated or inferred.

[0403] It should be understood that the order of steps or order for performing certain actions is immaterial so long as the present invention remain operable. Moreover, two or more steps or actions may be conducted simultaneously.

[0404] The use of any and all examples, or exemplary language herein, for example, “such as” or “including,” is intended merely to illustrate better the present invention and does not pose a limitation on the scope of the invention unless claimed. No language in the specification should be construed as indicating any non-claimed element as essential to the practice of the present invention.

### EXAMPLES

[0405] The following Examples are merely illustrative and are not intended to limit the scope or content of the invention in any way.

### Example 1

[0406] This example describes the construction of recombinant human sialidases (Neu1, Neu2, and Neu3).

[0407] The human sialidases Neu1, Neu2, Neu3 (isoform 1), and Neu4 (isoform 1) were expressed as secreted proteins with a 10×His tag. To express Neu1 as a secreted protein, the native N terminal signal peptide (MTGERPSTALPDRRWGPRILGFWGGCRVWVFAAIFLLLSLAASWSKA; SEQ ID NO: 27) was replaced by MDMRVPAQLLGLLLLWLPGARC (SEQ ID NO: 28), and the C terminal lysosomal signal motif (YGTL; SEQ ID NO: 29) was removed. To express Neu2, Neu3, and Neu4 as secreted proteins, the N terminal signal peptide MDMRVPAQLLGLLLLWLPGARC (SEQ ID NO: 28) was added to each.

[0408] Sialidases were expressed in a 200 mL transfection of HEK293F human cells in 24-well plates using the pCEP4 mammalian expression vector with an N-terminal 6×His tag. Sialidases were purified using Ni-NTA columns, quantified with a UV-Vis spectrophotometer (NanoDrop), and examined by SDS-PAGE as shown in FIG. 1. Neu1 expressed well, with a yield of ˜3 μg/ml, and was present primarily in a monomeric form. Neu2 and Neu3 expression each gave yields of ˜0.15 μg/mL and each were present primarily in a dimeric form. Neu4 had no detectable expression yield as measured by NanoDrop. Bacterial sialidase from Salmonella typhimurium (St-sialidase; SEQ ID NO: 30), which was used as a positive control for expression, gave a comparable yield to Neu1, and was present primarily in a monomeric form.

[0409] The activity of the recombinantly expressed sialidases was assayed by measuring the release of sialic acid from the fluorogenic substrate 4-methylumbelliferyl-N-acetylneuraminic acid (4MU-NeuAc). As shown in FIG. 2, Neu1 has no detectable activity above a no-enzyme control, which is consistent with previous reports indicating that Neu1 is inactive unless it is in complex with beta-galactosidase and protective protein/cathepsin A (PPCA). Neu2 and Neu3 were active. An enzyme kinetics assay was performed with Neu2 and Neu3. A fixed concentration of enzyme at 1 nM was incubated with fluorogenic substrate 4MU-NeuAc at concentrations ranging from 4000 μM to 7.8 μM. Assays were conducted at both acidic (pH 5.6) and neutral (pH 7) conditions. As shown in FIG. 3, both Neu2 and Neu3 were active at acidic and neutral conditions and showed enzyme kinetics that were comparable to those previously reported.

[0410] Most of the recombinantly expressed sialidases ran as aggregates or dimers on a non-reducing SDS-PAGE gel. Subsequent treatment with the reducing agent dithiothreitol (DTT) resulted in a monomeric form of the enzyme that ran at 42 kDa on a reducing SDS-PAGE gel (FIG. 1).

### Example 2

[0411] This example describes PD-L1 antibody discovery and hybridoma screening.

[0412] Antibodies were generated using two different methods. In the first method (Green Mountain Antibody, Vermont), 3 SJL/J mice and BALB/cJ mice were immunized using hPD-L1-hFc following the 28-day RIMMS protocol. PEG fusion of splenocytes and lymphocytes from the high titer mice with NS1 myeloma cells was performed to generate hybridomas.

[0413] In the second method (Aldevron, WI), human PD-L1 extracellular domain (ECD) was cloned into a vector plasmid also containing a detection tag for immunization and control. The plasmid constructs were transfected into mammalian cells. hPD-L1 expression was validated using flow cytometry with an hPD-L1 antibody and anti-tag antibody, the vector control using an irrelevant anti-tag antibody. Five mice were immunized with validated PD-L1 ECD plasmid DNA. The immune response was checked with mice sera using flow cytometry on cells transfected with hPD-L1. PEG fusion of splenocytes and lymphocytes from the high titer mice with NS1 myeloma cells was performed to generate hybridomas.

[0414] Hybridoma supernatants were screened using an ELISA to determine binding to human PD-L1 (hPD-L1) as well as cynomolgus PD-L1 (cPD-L1). Hybridoma supernatants were diluted 10× in ELISA binding buffer prior to loading on a hPD-L1-his tagged or cPD-L1-his tagged coated ELISA wells. The binding of mouse IgGs were detected using HRP-conjugated Goat-anti-mouse polyclonal antibody. The plate was developed with TMB and Stop buffer, the absorbance at 450 nm was read using SpectraMax plate reader.

[0415] A second assay was also utilized wherein hybridoma supernatants were screened for the ability to block biotinylated hPD-1-Fc from binding to hPD-L1. Hybridoma supernatants were diluted 3× in ELISA binding buffer and mixed with biotin-hPD-1-Fc at a final concentration of 1 μg/mL. The mixtures were loaded to hPD-L1-Fc coated ELISA wells for binding. The antibodies that recognized the hPD-1/hPD-L1 epitope bin competed for binding and reduced the hPD-1-Fc binding signal. The residual binding of biotin-hPD-1-Fc to hPD-L1-Fc was detected with HRP conjugated Streptavidin. The plate was developed with TMB and Stop buffer, and the absorbance at 450 nm was read using SpectraMax plate reader. The A450 absorbance was normalized to the hybridoma-conditioned medium control.

[0416] TABLE 10 is a summary of representative hybridoma supernatant screening results. Selected clones with good binding to hPD-L1 and cPD-L1 and with low residual binding were further characterized.

TABLE 10
Summary of Hybridoma Supernatant Screening

| | | | Block |
|---|---|---|---|
| Clone | huPD-L1-His | cyPD-L1-His | Residual % |
| 01A11 | 0.04325 | 0.0444 | 68% |
| 01E09 | 2.36185 | 1.5722 | 35% |
| 01G01 | 0.0496 | 0.0484 | 85% |
| 01G07 | 1.9901 | 1.3883 | 11% |
| 02C01 | 1.8316 | 1.3126 | 11% |
| 02C03 | 0.05075 | 0.04525 | 94% |
| 02C04 | 2.06255 | 1.441 | 47% |
| 02D06 | 0.03525 | 0.0367 | 87% |
| 02D10 | 1.83325 | 1.36395 | 9% |
| 02E09 | 1.96075 | 1.27385 | 82% |
| 02F06 | 0.0491 | 0.0451 | 92% |
| 02G09 | 0.04745 | 0.0418 | 89% |
| 02H01 | 0.1207 | 0.08695 | 91% |
| 02H02 | 0.0385 | 0.0375 | 99% |
| 02H07 | 2.3958 | 1.46115 | 30% |
| 03D03 | 0.0425 | 0.0402 | 84% |
| 03G01 | 0.04025 | 0.04055 | 82% |
| 03G08 | 0.04285 | 0.04215 | 93% |
| 03H06 | 0.04915 | 0.04295 | 92% |
| 04C01 | 0.0441 | 0.041 | 92% |
| 04C11 | 1.996 | 1.07865 | 33% |
| 04D05 | 2.1616 | 1.3421 | 39% |
| 04G02 | 0.0483 | 0.0447 | 89% |
| 04H04 | 0.04255 | 0.0387 | 82% |
| 05A04 | 0.03905 | 0.03935 | 82% |
| 05C02 | 0.03905 | 0.0385 | 88% |
| 05D01 | 0.04775 | 0.0431 | 79% |
| 05F02 | 0.0395 | 0.0398 | 81% |
| 05G01 | 0.06305 | 0.04815 | 96% |
| 05H01 | 0.04225 | 0.0419 | 83% |
| 05H03 | 0.0427 | 0.04095 | 83% |
| 05H07 | 0.05695 | 0.0472 | 81% |
| 06A10 | 0.0427 | 0.04205 | 102% |
| 06H03 | 0.0386 | 0.0392 | 99% |
| 07C04 | 2.5075 | 1.385 | 43% |
| 07D11 | 0.037 | 0.03705 | 99% |
| 07G03 | 0.23005 | 0.17695 | 112% |
| 07G09 | 2.57165 | 1.49485 | 119% |
| 08F01 | 0.03855 | 0.0361 | 100% |
| 08F02 | 0.97025 | 1.13735 | 106% |
| 08F08 | 0.0378 | 0.03775 | 101% |
| 09B07 | 1.706 | 0.5715 | 72% |
| 09C01 | 2.61775 | 1.31865 | 18% |
| 09F04 | 0.04145 | 0.04025 | 103% |
| 09F05 | 0.0412 | 0.04235 | 116% |
| 09F07 | 2.5844 | 1.31555 | 46% |
| 09G07 | 0.04155 | 0.03915 | 123% |
| 10B03 | 0.0439 | 0.0402 | 109% |
| 10B04 | 0.0445 | 0.04275 | 114% |
| 10C07 | 0.04485 | 0.04475 | 118% |
| 10C08 | 3.2374 | 0.12175 | 17% |
| 10D07 | 0.0387 | 0.03835 | 118% |
| 10E05 | 0.04135 | 0.04345 | 112% |
| 10E06 | 2.2714 | 1.5315 | 106% |
| 10F03 | 0.03975 | 0.04215 | 118% |
| 10F04 | 0.04305 | 0.03955 | 118% |
| 10F05 | 0.04405 | 0.04045 | 97% |
| 10F07 | 1.581 | 1.36875 | 101% |
| 10F10 | 0.0412 | 0.0387 | 104% |
| 10G09 | 2.75445 | 1.2858 | 51% |
| 11A01 | 0.0504 | 0.0437 | 111% |
| 11A06 | 0.04655 | 0.0439 | 111% |
| 11A08 | 2.049 | 1.4734 | 107% |
| 11F01 | 2.2419 | 1.62365 | 116% |
| 11H03 | 2.9876 | 1.32625 | 70% |
| 12A02 | 0.35785 | 0.4006 | 76% |
| 12A05 | 2.42665 | 1.40435 | 47% |
| 12B11 | 2.07995 | 1.2203 | 51% |
| 12E08 | 2.0973 | 1.46875 | 32% |
| 12G04 | 2.1039 | 1.37465 | 26% |
| 12H04 | 2.05395 | 1.4835 | 75% |
| 12H06 | 2.0525 | 1.42365 | 109% |
| 13F05 | 2.3518 | 1.4181 | 6% |
| 13G07 | 0.3502 | 0.6019 | 69% |
| 13H02 | 2.2304 | 1.35665 | 22% |
| 14B06 | 0.0383 | 0.0414 | 86% |
| 14C09 | 1.2704 | 1.12745 | 80% |
| 14F11 | 0.0405 | 0.04175 | 80% |
| 14G07 | 2.2582 | 1.4165 | 40% |
| 14H07 | 1.57355 | 1.31875 | 64% |
| 15D01 | 2.41115 | 1.4562 | 37% |
| 15D05 | 0.04585 | 0.0435 | 86% |
| 15E01 | 0.04575 | 0.04655 | 82% |
| 15F06 | 0.9242 | 0.78545 | 111% |
| 15G01 | 0.0506 | 0.04365 | 87% |
| 15G09 | 0.0423 | 0.04545 | 83% |
| 15H04 | 2.221 | 1.4642 | 21% |
| 15H08 | 0.05165 | 0.0468 | 74% |
| 16A04 | 0.0475 | 0.0514 | 67% |
| 16B05 | 0.183 | 0.16385 | 76% |
| 16F01 | 0.64805 | 0.94295 | 65% |
| 16F08 | 2.4565 | 1.32575 | 39% |
| 16G01 | 2.3645 | 0.9678 | 7% |
| 16H04 | 0.0439 | 0.04285 | 82% |
| POS | 2.31 | 1.44 | 10% |
| NEG | 0.034 | 0.03475 | 60% |

[0417] Functional blocking assay. The supernatants from selected PD-L1 antibody-producing hybridomas were tested in co-culture with (i) engineered CHO-K1 cells expressing human PD-L1 and TCR activating protein and (ii) Jurkat T cells expressing human PD-1, TCR and a luciferase reporter driven by an NFAT response element. Absent intervention, PD-L1 interacting with PD-1 inhibits TCR-mediated luminescence. Blockade of the PD-L1/PD-1 interaction, for instance using avelumab or PD-L1 antibody-containing supernatants, results in a luminescent signal. A luciferase substrate was added after 6 hours of incubation and luminescence was measured. Relative light units (RLU) were calculated by subtracting background (substrate and media only) from assay wells. Fold induction was calculated by dividing the RLU of induced cells minus background by the RLU of the no antibody control minus background. As shown in FIG. 7, hybridoma supernatants capable of disrupting the PD-L1/PD-1 interaction, resulting in a dose dependent increase in luminescence, were identified. FIGS. 7A, 7B and 7C represent the testing of three batches antibodies. Avelumab was used as a positive control producing a Fold Induction of 4 to 5 over a range of 0.1 to 10 μg/mL in this assay (data not shown). Fold induction=RLU (induced−background)/RLU (no antibody control−background). EC₅₀s of the indicated PD-L1 antibodies were comparable to the EC₅₀ for avelumab.

[0418] Screening of purified hybridoma antibodies. ForteBio octet binding of purified antibodies to recombinant hPD-L1-his and cPD-L1-his was measured. Mouse IgGs purified from hybridoma supernatant were captured on AMC (Anti-mouse IgG-Capture) Biosensor. hPD-L1-his or cPD-L1-his analytes were titrated from 100 nM in a 2× series dilution. The signal was subtracted with buffer reference and aligned to the baseline. KD, Kon and Koff values were generated using a 1:1 fitting model. The binding kinetics of selected purified hybridomas are shown in FIGS. 8A, 8B, 8C, and 8D for hPD-L1 and FIGS. 9A, 9B, 9C, and 9D for cPD-L1. The X-axes represent assay time in seconds, and the Y-axes represent binding signal on the biosensor. Each line represents the real time signal of antigen association and dissociation at the given antigen concentration in the assay (e.g., the top line represents the signal of the highest antigen concentration in the assay, the second top line represents the second highest concentration in the assay). The vertical dashed line represents the time point that the assay was moved from association step to the dissociation step. All the ForteBio/Octet assays were using standard/conventional settings and the graphs provided in the figures will be understood by one of skill in the art. The calculated KDs are shown in TABLE 11 for hPD-L1 and cPD-L1.

[0419] Purified hybridoma antibodies were tested for their ability to block biotinylated hPD-1-Fc from binding to hPD-L1. Antibodies were 3× titrated and mixed with biotinylated hPD-1-Fc at final concentration of 1 μg/mL. The mixture of antibody and biotin-hPD-1-Fc were loaded to hPD-L1-Fc coated ELISA wells for binding. The antibodies that recognize the hPD-1/hPD-L1 epitope bin will compete for the binding and result hPD-1-Fc binding signal reduction. The residual binding of biotin-hPD-1-Fc to hPD-L1-Fc were detected with HRP conjugated Streptavidin. The plate was developed with TMB and Stop buffer, the absorbance at 450 nm was read using SpectraMax plate reader. The A450 absorbance was normalized to the control that without antibody for the percentage values. The curve and IC₅₀ were generated using GraphPad Prism software. As depicted in FIG. 10, antibodies demonstrated either complete (C) or partial (P) blocking of hPD-1 to hPD-L1. The IC₅₀ as determined from the data is shown in FIG. 10 with many in the low single nM range or lower and is also shown in TABLE 11.

TABLE 11
Summary of anti-hPD-L1 hybridoma antibodies

| | | cell | | | ELISA | | |
|---|---|---|---|---|---|---|---|
| | | block | Kinetics KD (M) | | cyno, Fold | IC₅₀, | |
| Hybridoma | PAL ID | C/P | hPD-L1 | cPD-L1 | over Bkg | nM | C/P |
| 1D9.A7 | PAL747 | C | Low signal | Low signal | 1.10 | 1.69* | C |
| 1D9.B6 | PAL748 | | Low signal | | 0.94 | | |
| 3E2.B6 | PAL749 | P | 9.92 × 10⁻⁰⁹ | 7.44 × 10⁻⁰⁹ | 43.49 | 1.65 | P |
| 4G6.A3 | PAL751 | C | 3.85 × 10⁻¹⁰ | | | | |
| 4G6.H4 | PAL752 | | 7.89 × 10⁻¹⁰ | 4.03 × 10⁻⁰⁹ | 18.39 | 2.53 | C |
| 13F1.B7 | PAL759 | C | 1.14 × 10⁻⁰⁹ | | 13.12 | 4.64* | C |
| 13F1.F2 | PAL760 | | 7.11 × 10⁻¹⁰ | 1.09 × 10⁻⁰⁹ | 32.82 | | |
| 1G7.A8 | PAL767 | C | 8.03 × 10⁻¹⁰ | 5.77 × 10⁻¹¹ | 36.91 | 0.81 | C |
| 1G7.C8 | PAL768 | | 5.59 × 10⁻¹⁰ | | 34.91 | | |
| 2C1.C8 | PAL769 | C | 7.58 × 10⁻¹⁰ | 1.3 × 10⁻⁰⁹ | 39.52 | 0.51 | C |
| 2C1.D11 | PAL770 | | 8.82 × 10⁻¹⁰ | | 36.07 | | |
| 2D10.E2.B9 | PAL771 | C | 5.92 × 10⁻¹⁰ | 1.15 × 10⁻⁰⁹ | | | |
| 2D10.E2.H4 | PAL771.2 | | 1.54 × 10⁻⁰⁹ | 2.27 × 10⁻⁰⁹ | 38.14 | 0.6 | C |
| 2D10.G3 | PAL772 | | 1.75 × 10⁻⁰⁹ | 2.64 × 10⁻⁰⁹ | 22.16 | | |
| 10C8.A7 | PAL775 | P | 2 phase | | 1.82 | 2.37 | C |
| 10C8.H5 | PAL776 | | 2 phase | | 1.15 | | |
| 16G1.A5 | PAL785 | C | 1.02 × 10⁻⁰⁹ | 6.42 × 10⁻¹⁰ | 4.98 | 0.68 | C |
| 16G1.D7 | PAL786 | | 1.45 × 10⁻⁰⁹ | 1.73 × 10⁻⁰⁹ | 2.97 | | |
| CKH-3D10 | PAL787(3D10) | P | 2.77 × 10⁻¹⁰ | 2.83 × 10⁻¹⁰ | 38.22 | 4.07 | P |
| CKH-3E3 | PAL788(3E3) | C | 1.88 × 10⁻¹⁰ | 3.92 × 10⁻¹⁰ | 24.81 | 0.89 | C |
| | Avelumab | C | 7.54 × 10⁻¹⁰ | 1.7 × 10⁻⁰⁹ | N/A | 0.38 | C |

### Example 3

[0420] This example describes the generation and characterization of chimeric PD-L1 antibodies. VH and VL gene sequences of hybridoma antibodies were isolated and sequenced. VL sequences are shown in TABLE 12, VH sequences in TABLE 13 and Light and Heavy Chain CDRs in TABLE 14. The DNA fragments coding for the V gene of interest were synthesized through conventional vendor. The VH and VL sequences were cloned into human IgG1 constant heavy chain backbone and human constant kappa light chain backbone respectively. The heavy chain and light chain DNA plasmids were transiently co-transfected in HEK293 cells to express the full IgGs.

TABLE 12
Encoded Variable Light sequences

| ID | VL |
|---|---|
| PAL | DIQMTQSSFSFSVSLGDRVTIICKASEDIYNRLAWYQQKPGN |
| 752 | TPRLLISGATSLETGVPSRFSGSGSGKDYTLSITSLQTEDVA |
| | TYYCQQYWSTPWTFGGGTKLEIK (SEQ ID NO: 136) |
| PAL | DILLTQSPAILSVSPGERVSFSCRASQSIGTSIHWYQQRTNG |
| 759 | SPRLLIKYASESISGIPSRFSGSGSGTDFTLSINSVESEDIG |
| | DYYCQQSNNWPFTFGSGTKLEIK (SEQ ID NO: 144) |
| PAL | DIVMTQSPASLAVSLGQKATISCKASKKVTIFGSISVLHWYQ |
| 760 | QKPGQPPKLIYNGAKLESGVSARFSDSGSQNRSPFGNQLNFT |
| | LTIDPVEADDAATYYCLQNKEVPYTFGGGTELEIK (SEQ |
| | ID NO: 152) |
| PAL | DIVMSQSPSSLAVSVGEKVTMSCKSSQSLLYSSNQKNSLAWY |
| 767 | QQKPGQSPKLLIYWASTRESGVPDRFTGSGSGTDFTLTISSV |
| | KAEDLAVYYCQQYYGYPWTFGGGTKLEIK (SEQ ID NO: |
| | 160) |
| PAL | SIVMTQTPKFLLVSAGDRVTITCKASQSVSNDVIWYQQKPGQ |
| 769 | SPKLLIYYASIRFTGVPDRFAGSGYGTDFTFTINTVQAEDLA |
| | VYFCQQDYNSPWTFGGGTKLEIK (SEQ ID NO: 167) |
| PAL | QIVLTQSPAIMSASPGEKVTMTCSASSSVSYMYWYQQKPGSS |
| 771 | PRLLIYDTSNLASGVPLRFSGSGSGTSYSLTLSRMEAEDAAT |
| | YYCQQWSTYPLTFGAGTKLELK (SEQ ID NO: 174) |
| PAL | DIVLTQSPASLAVSLGQRATISCRASESVEFYGTTLMQWYQQ |
| 785 | KPGQPPKLLIYAASNVESGVPARFSGSGSGTDFSLNIHPVEE |
| | GDIGMYFCQQSRKVPYTFGGGTKLEIK (SEQ ID NO: |
| | 182) |
| PAL | DIVMTQSQNFMSTSVGDRVSVTCKASHYVGTFVAWYQQKPGQ |
| 787 | SPKALIFSTSYRHTGVPDRFTGSGSGTDFTLTISNVQSEDLA |
| | DYFCQQYYNSPLTFGAGTKLELK (SEQ ID NO: 190) |
| PAL | NIVLTQSPASLAVSLGQRATISCRASESVDSYGNSFMHWYQQ |
| 788 | KPGQPPKLLIYLASNLQSGVPARFSGSGSRTDFTLTIDPVEA |
| | DDAATYYCQQNNEDPWTFGGGTKLEIK (SEQ ID NO: |
| | 198) |

TABLE 13
Encoded Variable Heavy sequences

| ID | VH |
|---|---|
| PAL | EVQLQESGAELARPGASVKLSCKASGHAFTSDSINWVKQRIG |
| 752 | QGLEWIGEIYPRSGNPYYNEKFKGKATLTADKSSSTAYMELR |
| | SLTSEDSAVYFCATDYYGRYFDVWGTGTTVTVSS (SEQ ID |
| | NO: 132) |
| PAL | EVQLQESGAELVRPGASVKLSCKASGYSFTDYYINWVKQRPG |
| 759 | QGLEWIARIYPGSGNTYYNEKFKGKATLTAEKSSITAYMQLS |
| | SLTSEDSAVYFCARSYYYGSSYLFDYWGQGTTLTVSS (SEQ |
| | ID NO: 140) |
| PAL | EVQLQQSGPELVKPGALVKISCKASGYTFTDYYMNWVKKSHG |
| 760 | RSLEWIGDINPNNGYTNYNQNFKGKATLTVDKSSSTVYMELR |
| | SLTSEDSAVYYCARSAAYYVLDDWGQGTSVTVSS (SEQ ID |
| | NO: 148) |
| PAL | EVQLQESGPSLVKPSQTLSLTCSVTGDSITSGYWNWIRKFPG |
| 767 | NKLEYMGYISYTGSTYYNPSLKRRISITRDTSKNQYYLQLNS |
| | VTTEDTATYYCASQGGWLQAMDYWGQGTSVTVSS (SEQ ID |
| | NO: 156) |
| PAL | EVQLQESGAELVKPGASVTLSCTASGFNIKDTYMHWVKQRPE |
| 769 | QGLEWIGRIDPANDNTKYDPKFQDKATITADTSSDTAYLRLS |
| | SLTSEDTAVYYCAREGYGGSYGEGYWGQGTTLTVSS (SEQ |
| | ID NO: 164) |
| PAL | EVQLQESGAELVKPGASVKLSCTASGFNIKDTYMHWVKQRPE |
| 771 | QGLEWIGRIDPANGNTKYDPKFPGKATITADTSSNTAYLQLS |
| | SLTSEDAAVYYCARPFNYRFYDVYYFDYWGQGTTLTVST |
| | (SEQ ID NO: 170) |
| PAL | EVQLQESGPELVKPGTSVKMSCKASGYTFTSYVMHWVKQRPG |
| 785 | QGLEWIGYINPYNDGSKYNEKFKGKATLTSDTSSSTAYMELS |
| | SLTSEDSAVYYCAKQTLDFWGQGTSVTVST (SEQ ID NO: |
| | 178) |
| PAL | QVTLKESGPGILQPSQTLSLTCSFSGFSLSTYGLGVGWIRQP |
| 787 | SGKGLEWLANIWWNDDKFYDSVLKSRLTISKDTSNNQVFLKI |
| | SSVDTSETATYYCAQTLHYYDGIAWFAYWGQGTLVTVSA |
| | (SEQ ID NO: 186) |
| PAL | QVQLQQPGAELVKPGASVKLSCKASGYTFTSNWMNWVKQRPG |
| 788 | RGLEWIGRIHPSDSETHYHQKFKSKATLTVDKSSSTAYIQLS |
| | SLTSEDSAVYYCAHSSGDYGRDYWGQGTTLTVSS (SEQ ID |
| | NO: 194) |

TABLE 14
Light and Heavy Chain CDRs

| ID | CDR-L1 | CDR-L2 | CDR-L3 | CDR-H1 | CDR-H2 | CDR-H3 |
|---|---|---|---|---|---|---|
| PAL752 | EDIYNR | GAT (SEQ | QQYWSTPWT | GHAFTSDS | IYPRSGNP | DYYGRYFD |
| | (SEQ ID NO: | ID NO: | (SEQ ID NO: | (SEQ ID NO: | (SEQ ID NO: | V (SEQ ID |
| | 133) | 134) | 135) | 129) | 130) | NO: 131) |
| PAL759 | QSIGTS (SEQ | YAS (SEQ | QQSNNWPFT | GYSFTDYY | IYPGSGNT | SYYYGSSYL |
| | ID NO: 141) | ID NO: | (SEQ ID NO: | (SEQ ID NO: | (SEQ ID NO: | FDY (SEQ ID |
| | | 142) | 143) | 137) | 138) | NO: 139) |
| PAL760 | KKVTIFGSIS | NGA (SEQ | LQNKEVPYT | GYTFTDYY | INPNNGYT | SAAYYVLD |
| | V (SEQ ID | ID NO: | (SEQ ID NO: | (SEQ ID NO: | (SEQ ID NO: | D (SEQ ID |
| | NO: 149) | 150) | 151) | 145) | 146) | NO: 147) |
| PAL767 | QSLLYSSNQ | WAS (SEQ | QQYYGYPWT | GDSITSGY | ISYTGST | QGGWLQAM |
| | KNS (SEQ ID | ID NO: | (SEQ ID NO: | (SEQ ID NO: | (SEQ ID NO: | DY (SEQ ID |
| | NO: 157) | 158) | 159) | 153) | 154) | NO: 155) |
| PAL769 | QSVSND | YAS (SEQ | QQDYNSPWT | GFNIKDTY | IDPANDNT | EGYGGSYGE |
| | (SEQ ID | ID NO: | (SEQ ID NO: | (SEQ ID NO: | (SEQ ID NO: | GY (SEQ ID |
| | NO:165) | 142) | 166) | 161) | 162) | NO: 163) |
| PAL771 | SSVSY (SEQ | DTS (SEQ | QQWSTYPLT | GFNIKDTY | IDPANGNT | PFNYRFYDV |
| | ID NO: 171) | ID NO: | (SEQ ID NO: | (SEQ ID NO: | (SEQ ID NO: | YYFDY (SEQ |
| | | 172) | 173) | 161) | 168) | ID NO: 169) |
| PAL785 | ESVEFYGTT | AAS (SEQ | QQSRKVPYT | GYTFTSYV | INPYNDGS | QTLDF (SEQ |
| | L (SEQ ID | ID NO: | (SEQ ID NO: | (SEQ ID NO: | (SEQ ID NO: | ID NO: 177) |
| | NO: 179) | 180) | 181) | 175) | 176) | |
| PAL787 | HYVGTF | STS (SEQ | QQYYNSPLT | GFSLSTYGLG | IWWNDDK | TLHYYDGIA |
| | (SEQ ID NO: | ID NO: | (SEQ ID NO: | (SEQ ID NO: | (SEQ ID NO: | WFAY (SEQ |
| | 187) | 188) | 189) | 183) | 184) | ID NO: 185) |
| PAL788 | ESVDSYGNS | LAS (SEQ | QQNNEDPWT | GYTFTSNW | IHPSDSET | SSGDYGRDY |
| | F (SEQ ID | ID NO: | (SEQ ID NO: | (SEQ ID NO: | (SEQ ID NO: | (SEQ ID NO: |
| | NO: 195) | 196) | 197) | 191) | 192) | 193) |

[0421] Characterization of chimeric anti-PD-L1 antibodies. ForteBio octet binding of purified chimeric antibodies and recombinant hPD-L1-his and cPD-L1-his was measured. Chimeric human antibodies were captured on AHC (Anti-human IgG-Capture) Biosensor, hPD-L1-his or cPD-L1-his analytes were titrated from 100 nM in a 2× series dilution. The buffer reference was subtracted from the signal and aligned to the baseline. KD, Kon and Koff values were generated using 1:1 fitting model as described above. The binding kinetics of selected chimeric antibodies are shown in FIG. 11A and FIG. 11B for hPD-L1 and FIG. 11C and FIG. 11D for cPD-L1. The calculated KDs are shown in TABLE 15 for hPD-L1 and cPD-L1.

[0422] Purified chimeric antibodies were tested for their ability to block biotinylated hPD-1-Fc from binding to hPD-L1 as described above. FIG. 12 depicts the results and the calculated IC₅₀s, all of which are in the single digit nM range. Protein A purified chimeric antibodies were examined by size exclusion chromatography and quantified with a UV-Vis spectrophotometer (NanoDrop; mAU=milli absorbance units). FIG. 13 depicts UV traces of size exclusion chromatographs with the indicated amount of monomeric peaks at the expected retention times.

[0423] Purified chimeric antibodies were evaluated for their ability to bind PD-L1 expressed on two human cancer cell lines. HCC827 and NCI-292 cells were incubated with titrated antibodies for 30 min at 4° C. Cells were washed and incubated with AF647-labeled goat anti-human IgG(H+L) for 30 min at 4° C. Cells were washed, fixed and analyzed on FACSCelesta. FIG. 14 depicts the binding curves and calculated Kd for selected chimeric antibodies to HCC827 cells (FIG. 14A) and NCI-292 cells (FIG. 14B).

[0424] Purified chimeric antibodies were evaluated for their ability to bind and be internalized by human dendritic cells (DC). Monocyte-derived DC (moDC) were either (1) stimulated with Pam3CSK4 at 250 ng/ml before the day of experiment or (2) not stimulated. Cells were blocked for 30 min at room temperature, and incubated with 1 nM or 10 nM antibodies for 30 min on ice. Cells were washed and divided into two equal portions for a 2-hour incubation on either ice or at 37° C. Cells were washed and incubated with goat anti-human IgG(H+L) for 30 min on ice. Cells were washed, fixed, and analyzed on FACSCelesta. Percent internalization was determined as the reduction of bound antibody on cells after 2 hour incubation at 37° C. as compared to 4° C. FIG. 15 depicts the % internalization for the indicated chimeric antibodies under the different conditions. All antibodies had a relatively limited rate of internalization, between 20% and 30%, after 2 hours including with the stimulated cells.

[0425] Purified chimeric antibodies were evaluated for their ability to functionally block PD-1 binding to PD-L1 as described above. Purified chimeric PD-L1 antibodies were tested in co-culture with (i) engineered CHO-K1 cells expressing human PD-L1 and TCR activating protein and (ii) Jurkat T cells expressing human PD-1, TCR and a luciferase reporter driven by an NFAT response element. As shown in FIG. 16, the tested chimeric antibodies disrupted the PD-L1/PD-1 interaction, resulting in a dose dependent increase in luminescence. Kds of the PD-L1 antibodies were all single digit nM or sub nM.

[0426] The specificity of the antibodies for cell surface expressed hPD-L1 was confirmed by comparing binding of antibodies to CHO cells expressing hPD-L1 vs wild type CHO cells. CHO cells were incubated with 100 nM antibodies and CHO-PD-L1 cells (from Bioassay) with 10 nM antibodies for 30 min at 4° C. Cells were washed and incubated with goat anti-human IgG(H+L) for 30 in at 4° C. The washed cells were fixed and run on FACSCelesta. FIG. 17 depicts the mean fluorescence intensity (MFI) of the indicated chimeric antibody as compared to isotype and other negative controls and avelumab. Specific staining to CHO-PD-L1 cells was seen for the PD-L1 antibodies with very little non-specific binding to CHO cells, even at high antibody concentrations.

[0427] The ability of chimeric PD-L1 antibodies to modulate T cell function was tested. Monocyte-derived Dendritic Cells (moDC) were incubated with CellTrace Violet (CTV)-labeled allogeneic T cells in the presence of antibodies for 5 days. Proliferation was measured by FACSCelesta. Cytokine and cytolytic granules in supernatant were analyzed by multiplex bead-based assay. Each panel of FIGS. 18-20 shows two experiments: the left 5 bars show T cells from donor 1 responding to moDC from donor 2, and the right 5 bars show T cells from donor 2 responding to moDC from donor 1.

[0428] FIG. 18 depicts the enhancement of T cell proliferation and cytokine response to allogeneic moDC in the presence of the indicated PD-L1 antibodies compared to isotype control (001-1). FIG. 18 shows CD4 T cell proliferation (FIG. 18A), CD8 T cell proliferation (FIG. 18B), TNFα (FIG. 18C), and IFN-γ levels (FIG. 18D).

[0429] FIG. 19 depicts the enhancement of cytokine response to allogeneic moDC in the presence of indicated PD-L1 antibodies compared to isotype control (001-1). FIG. 19 shows IL-2 (FIG. 19A), IL-4 (FIG. 19B), IL-6 (FIG. 19C) and IL-10 levels (FIG. 19D).

[0430] FIG. 20 depicts the enhancement of degranulation in moDC-T cell MLR in the presence of the indicated PD-L1 antibodies compared to isotype control (001-1). FIG. 20 shows soluble Fas Ligand (FIG. 20A), Granzyme A (FIG. 20B), perforin (FIG. 20C) and granulysin (FIG. 20D).

[0431] TABLE 15 is a summary of the biochemical and cellular activity of the chimeric PD-L1 antibodies.

TABLE 15
Anti-PD-L1 chimeric IgG characterization summary

| Characterizations | | 752-hIgG1 | 767-hIgG1 | 769-hIgG1 | 771-hIgG1 | 785-hIgG1 | 788-hIgG1 | Avelumab |
|---|---|---|---|---|---|---|---|---|
| Kd to hPD-L1, M | | 1.18 × 10⁻⁰⁹ | 5.22 × 10⁻¹¹ | 6.40 × 10⁻¹⁰ | 1.43 × 10⁻⁰⁹ | 1.64 × 10⁻⁰⁹ | 4.30 × 10⁻¹¹ | 5.53 × 10⁻¹⁰ |
| Kd to cPD-L1, M | | 3.18 × 10⁻⁰⁹ | 2.66 × 10⁻¹⁰ | 5.50 × 10⁻¹⁰ | 1.12 × 10⁻⁰⁹ | 7.24 × 10⁻¹⁰ | 8.67 × 10⁻¹⁰ | 9.94 × 10⁻¹⁰ |
| IC₅₀, nM (ELISA) | | 4.6 | 2 | 1.6 | 1.8 | 1.9 | 2.9 | 2 |
| IC₅₀, nM (Function) | | 1.5 | 0.6 | 0.5 | 1 | 0.5 | 0.9 | 0.5 |
| Monomer % (SEC) | | 72% | 97% | 97% | 100% | 100% | 100% | 100% |
| Bind PD-L1-CHO/CHO | | >100x | >100x | >100x | >100x | >100x | >100x | >100x |
| PD-L2 binding | | No | No | No | No | No | No | No |
| HCC827 Kd, nM | | 3.63 | 0.26 | 0.17 | 1.02 | 0.29 | 1.57 | 0.3 |
| NCI-H292 Kd, nM | | 4.98 | 0.23 | 0.12 | 1.17 | 0.19 | 1.68 | 0.27 |
| DC Int % | NS, 10 nM | 10.19 | 9.15 | 12.19 | 16.95 | 19.01 | 12.48 | 6.04 |
| Donor1 | NS, 1 nM | 14.29 | 9.34 | 4.51 | 17.52 | 16.87 | 13.96 | 7.31 |
| | Pam, 10 nM | 0.94 | 1.13 | 1.34 | 6.85 | 3.44 | −3.44 | −3.47 |
| DC Int % | NS, 1 nM | 29.19 | 18.05 | 20.17 | 24.5 | 22.37 | 28.07 | 21.33 |
| Donor2 | NS, 10 nM | 31.14 | 25.14 | 30.67 | 31.82 | 31.27 | 31.02 | 25.97 |
| | Pam, 10 nM | 21.77 | 22.99 | 26.45 | 31.79 | 29.27 | 24.33 | 21.98 |

### Example 4

[0432] This example describes the PD-L1 antibody humanization. FIG. 21A depicts the PAL769 VH sequence in mouse frameworks (769VH-wt; SEQ ID NO: 164) compared to the VH sequence in human frameworks (h769VH-mF0; SEQ ID NO: 199). CDRs identified by IMGT are shown in red (GFNIKDTY (SEQ ID NO: 161; IDPANDNT (SEQ ID NO: 162; and AREGYGGSYGEGY (amino acids 97-109 of SEQ ID NO: 164). Note that CDRs provided elsewhere in the application may be identified by other definitions (e.g., Kabat) and may vary. FIG. 21B depicts the PAL769 VL sequence in mouse frameworks (769Vk-wt; SEQ ID NO: 167) compared to the VL sequence in human frameworks (h769Vk-mF0; SEQ ID NO: 242). Highlighted amino acids in 769Vk-wt were back mutated and tested for activity (data not shown). A series of single back mutations (h769Vk-T53I (SEQ ID NO: 243); h769Vk-A55F (SEQ ID NO: 244); h769Vk-S67Y (SEQ ID NO: 245); h769Vk-Y87F (SEQ ID NO: 246)) chosen for further study are also shown. FIG. 21C depicts a series of 2 or 3 back mutations as well as a potential deamidation motif on CDR-L3 (h769Vk-IY (SEQ ID NO: 247); h769Vk-IF2 (SEQ ID NO: 248); h769Vk-tm1 (SEQ ID NO: 249); h769Vk-IF3 (SEQ ID NO: 200); h769Vk-tm2 (SEQ ID NO: 201); h769Vk-tm3 (SEQ ID NO: 202)).

[0433] Selected h769 mutations were produced and purified. FIG. 22 depicts UV traces of size exclusion chromatographs of a selected group of humanized PD-L1 antibodies with monomeric peaks at the expected retention times. As described supra, ForteBio octet binding of purified humanized antibodies to recombinant hPD-L1-his and cPD-L1-his was measured with curves for hPD-L1 shown in FIG. 23A and for cPD-L1 shown in FIG. 23B. KD, Kon and Kdis values for human and cyno PD-L1 are shown in TABLE 16.

TABLE 16

| | Human PD-L1 | | | Cyno PD-L1 | | |
|---|---|---|---|---|---|---|
| Clone ID | KD (M) | kon(1/Ms) | kdis(1/s) | KD (M) | kon(1/Ms) | kdis(1/s) |
| 769-wt | 2.59 × 10⁻⁰⁹ | 3.73 × 10⁵ | 9.67 × 10⁻⁰⁴ | 2.92 × 10⁻⁰⁹ | 2.38 × 10⁵ | 6.85 × 10⁻⁰⁴ |
| h769-IF3 | 2.64 × 10⁻⁰⁹ | 3.30 × 10⁵ | 8.71 × 10⁻⁰⁴ | 2.92 × 10⁻⁰⁹ | 2.08 × 10⁵ | 6.02 × 10⁻⁰⁴ |
| h769-tm2 | 2.48 × 10⁻⁰⁹ | 3.31 × 10⁵ | 8.18 × 10⁻⁰⁴ | 3.01 × 10⁻⁰⁹ | 2.04 × 10⁵ | 5.93 × 10⁻⁰⁴ |
| h769-tm3 | 2.95 × 10⁻⁰⁹ | 3.11 × 10⁵ | 9.04 × 10⁻⁰⁴ | 3.11 × 10⁻⁰⁹ | 2.11 × 10⁵ | 6.50 × 10⁻⁰⁴ |

[0434] Selected h769 antibodies were tested in the blocking ELISA as described in Example 3 herein. Results are shown in FIG. 24 and calculated IC₅₀s (nM) are indicated. Selected h769 humanized PD-L1 antibodies were characterized following removal of the deamidation motif in CDR-L3. FIG. 25 depicts the ForteBio octet binding of purified humanized antibodies and recombinant hPD-L1-his was measured. KD, Kon and Kdis values for human PD-L1 are shown in TABLE 17. FIG. 26 depicts UV traces of size exclusion chromatographs of monomeric peaks at the expected retention times.

TABLE 17

| Clone ID | KD (M) | kon(1/Ms) | kdis(1/s) |
|---|---|---|---|
| h769-N93 | 1.98 × 10⁻⁰⁹ | 2.92 × 105 | 5.80 × 10⁻⁰⁴ |
| h769-N93A | 1.46 × 10⁻⁰⁹ | 2.84 × 105 | 4.14 × 10⁻⁰⁴ |
| h769-N93T | 1.82 × 10⁻⁰⁹ | 3.28 × 105 | 5.97 × 10⁻⁰⁴ |

[0435] FIG. 27 shows that selected 769-hIgG1 humanized variants enhance T cell response to allogeneic moDC. Avelumab was also tested in both an IgG1 format as well as a IgG1 N297G format. PAL-767-1 was also used as a control (labeled blind in figures). FIG. 27 shows CD4 T cell proliferation (FIG. 27A), Granzyme B (FIG. 27B), and IFN-γ (FIG. 27C) as well as CD8 T cell proliferation (FIG. 27D), Granzyme A (FIG. 27E) and TNFα levels (FIG. 27F).

[0436] FIG. 28 shows that selected 769-hIgG1 humanized variants enhance T cell response to allogeneic moDC. FIG. 28 shows Perforin (FIG. 28A), soluble Fas (FIG. 28B), IL-6 (FIG. 28C), Granulysin (FIG. 28D), soluble Fas Ligand (FIG. 28E) and IL-10 levels (FIG. 28F).

[0437] Selected 769-hIgG1 humanized variants were tested for their ability to enhance PBMC cytokine responses to CMV pp65. PBMCs were incubated with or without CMV pp65 protein stimulation in the presence of antibodies for 4 days. Cytokine and cytolytic granules in supernatant were analyzed by multiplex bead-based assay.

[0438] FIGS. 29-33 show that selected 769-hIgG1 humanized variants enhance PBMC cytokine responses to CMV pp65, including by increasing levels of IL2, TNFα, IL-6, IL-17A, Granzyme A, Granulysin, and IFN-γ. These results suggest that the 769-hIgG1 humanized variants may be capable of enhancing an immune response in PBMCs. Specifically, FIG. 29 shows that selected 769-hIgG1 humanized variants enhance PBMC cytokine responses to CMV pp65. Levels of IL-2 (FIG. 29A) and TNFα (FIG. 29B) are shown. FIG. 30 shows that selected 769-hIgG1 humanized variants enhance PBMC cytokine responses to CMV pp65. Levels of IL-6 (FIG. 30A) and IL-17A (FIG. 30B) are shown. FIG. 31 shows that selected 769-hIgG1 humanized variants enhance PBMC cytokine responses to CMV pp65. Levels of Granzyme A (FIG. 31A) and Granzyme B (FIG. 31B) are shown. FIG. 32 shows that selected 769-hIgG1 humanized variants enhance PBMC cytokine responses to CMV pp65. Levels of Perforin (FIG. 32A) and Granulysin (FIG. 32B) are shown. FIG. 33 shows that selected 769-hIgG1 humanized variants enhance PBMC IFN-γ response to CMV pp65.

[0439] Next, an epitope binning sandwich assay was developed to determine whether the epitope of h769.T-1A overlapped with PAL-752, PAL-767, PAL-769, PAL-771, PAL-785 or PAL-788. h769.T-1A includes: the variable region h769.T (also referred to as h769-N93T), which includes a heavy chain variable region of SEQ ID NO: 199 and light chain variable region of SEQ ID NO: 204; and a human IgG1 constant region including a N297A mutation. The mouse IgG hybridoma version of each antibody was tested. The assay was performed as follows:
[0440] Step 1: 1st antibody of mouse IgGs was captured on AMC biosensor;
[0441] Step 2: binding to hPD-L1-his antigen; and
[0442] Step 3: binding to h769.T-1A.

[0443] As shown in FIG. 34, hPD-L1-his that was bound to PAL752 (second to top line) and PAL788 (top line) can still bind to h769.T-1A, suggesting that these two antibody epitopes do not overlap with the epitope of h769.T-1A, and that PAL767, PAL769, PAL771 and PAL785 have shared or overlapping epitopes with h769.T-1A.

### Example 5

[0444] This example describes the construction of PD-L1 antibody sialidase conjugates.

[0445] An exemplary configuration of an anti-PD-L1 antibody ASC is referred to as “Janus,” and contains one antibody arm (with one heavy chain and one light chain), and one sialidase-Fc fusion with a sialidase fused at the N-terminus of one arm of the Fc. Each Fc domain polypeptide in the Janus ASC contains either the “knob” (T366Y) or “hole” (Y407T) mutation for heterodimerization (residue numbers according to EU numbering, Kabat, E. A., et al. (1991) supra) (see, e.g., FIG. 6B).

[0446] A Janus PD-L1 antibody sialidase conjugate was constructed using Neu2 with M1D, V6Y, P62G, A93E, I187K, and C332A mutations, the variable region of anti-PD-L1 antibody h769.T (as described in Example 4 herein, and also referred to as h769-N93T), and a human IgG1 Fc domain including an N297A mutation. This Janus PD-L1 antibody sialidase conjugate (referred to as ASC1, and including a first polypeptide chain with amino acid sequence SEQ ID NO: 205, encoded by nucleotide sequence SEQ ID NO: 208, a second polypeptide chain with amino acid sequence SEQ ID NO: 206, encoded by nucleotide sequence SEQ ID NO: 209, and a third polypeptide chain with amino acid sequence SEQ ID NO: 207, encoded by nucleotide sequence SEQ ID NO: 210) was expressed and characterized for purity using SDS-PAGE and enzymatic activity using 4MU-NeuAc as described below.

[0447] ASC1 was expressed in a 1,000 mL transfection of Expi293 human cells using the pCEP4 mammalian expression vector. The PD-L1 antibody sialidase conjugate was purified using protein A followed by Ceramic Hydroxyapatite chromatography, quantified with a UV-Vis spectrophotometer (NanoDrop), and examined by SDS-PAGE as shown in FIG. 35A. ASC1 expressed well with an 89% purity after purification (FIG. 35B).

[0448] The activity of ASC1 was assayed by measuring the release of sialic acid from the fluorogenic substrate 4-methylumbelliferyl-N-acetylneuraminic acid (4MU-NeuAc). Specifically, an enzyme kinetics assay was performed by incubating a fixed concentration of enzyme at 1 nM with fluorogenic substrate 4MU-NeuAc at concentrations ranging from 4000 μM to 7.8 μM. ASC1 was active with a Vmax of 5.5×10⁷, causing the release of sialic acid which generated fluorescence. Assays were conducted at pH 5.6.

[0449] FIG. 36 shows a binding assay (ForteBio octet binding) between atezolizumab, h769 hIgG1, h769-N93T or ASC1 and recombinant human PD-L1. TABLE 18 has the binding kinetics of the four test articles demonstrating very similar KDs in the 1-2 nM range.

TABLE 18

| Clone | KD (M) | kon(1/Ms) | kdis(1/s) |
|---|---|---|---|
| atezolizumab | 1.61 × 10⁻⁰⁹ | 3.02 × 105 | 4.87 × 10⁻⁰⁴ |
| h769 | 1.78 × 10⁻⁰⁹ | 3.53 × 105 | 6.23 × 10⁻⁰⁴ |
| h769.T | 1.76 × 10⁻⁰⁹ | 3.57 × 105 | 6.29 × 10⁻⁰⁴ |
| ASC1 | 1.72 × 10⁻⁰⁹ | 4.56 × 105 | 7.66 × 10⁻⁰⁴ |

[0450] A second Janus PD-L1 antibody sialidase conjugate was constructed using Neu2 with M1D, V6Y, P62G, A93E, Q126Y, I187K, A242F, Q270T, and C332A mutations, the variable region of anti-PD-L1 antibody h769.T (as described in Example 4 herein, and also referred to as h769-N93T), and a human IgG1 Fc domain including an N297A mutation. This Janus PD-L1 antibody sialidase conjugate (referred to as ASC3, and including a first polypeptide chain with amino acid sequence SEQ ID NO: 205, encoded by nucleotide sequence SEQ ID NO: 208, a second polypeptide chain with amino acid sequence SEQ ID NO: 213, encoded by nucleotide sequence SEQ ID NO: 215, and a third polypeptide chain with amino acid sequence SEQ ID NO: 214, encoded by nucleotide sequence SEQ ID NO: 216) was expressed and characterized for purity using SDS-PAGE and enzymatic activity using 4MU-NeuAc as described below.

[0451] ASC3 was expressed in a 2,000 mL transfection of Expi293 human cells using the pCEP4 mammalian expression vector. The PD-L1 antibody sialidase conjugate was purified using protein A followed by cation exchange and Ceramic Hydroxyapatite chromatography, quantified with a UV-Vis spectrophotometer (NanoDrop), and examined by SDS-PAGE. ASC3 expressed well with a 97% purity by SEC after purification (FIG. 37A).

[0452] The activity of ASC3 was assayed by measuring the release of sialic acid from the fluorogenic substrate 4-methylumbelliferyl-N-acetylneuraminic acid (4MU-NeuAc). Specifically, an enzyme kinetics assay was performed by incubating a fixed concentration of enzyme at 1 nM with fluorogenic substrate 4MU-NeuAc at concentrations ranging from 4000 μM to 7.8 μM. Several batches of ASC3 was active with a Vmax of 1.15×10⁸, causing the release of sialic acid which generated fluorescence as shown in FIG. 37B. Assays were conducted at pH 5.6.

[0453] A series of additional PD-L1 antibody sialidase conjugates were made. A third was constructed using Neu2 with M1D, V6Y, K9D, I187K, C332A, A93E, V363R, L365R, E218A, and C219N mutations, the variable region of anti-PD-L1 antibody h769.T (as described in Example 4 herein, and also referred to as h769-N93T), and a human IgG1 Fc domain including an N297A mutation. This Janus PD-L1 antibody sialidase conjugate (referred to as ASC4 loss of function (LOF), and including a first polypeptide chain with amino acid sequence SEQ ID NO: 205, encoded by nucleotide sequence SEQ ID NO: 208, a second polypeptide chain with amino acid sequence SEQ ID NO: 213, encoded by nucleotide sequence SEQ ID NO: 215, and a third polypeptide chain with amino acid sequence SEQ ID NO: 217, encoded by nucleotide sequence SEQ ID NO: 218) was expressed and characterized for purity using SDS-PAGE and enzymatic activity using 4MU-NeuAc as described above.

[0454] ASC4 LOF was expressed in a 1,000 mL transfection of Expi293 human cells using the pCEP4 mammalian expression vector. The PD-L1 antibody sialidase conjugate was purified using protein A followed by cation exchange and CHT Ceramic Hydroxyapatite chromatography, quantified with a UV-Vis spectrophotometer (NanoDrop), and examined by SDS-PAGE. ASC4 LOF expressed well with a purity of 65% by SEC after purification (FIG. 38). As expected, ASC4 LOF had no detectable activity using 4MU-NeuAc as a substrate.

[0455] A fourth PD-L1 antibody sialidase conjugate was constructed using Neu2 with M1D, V6Y, A42R, P62G, A93E, Q126Y, I187K, A242F, Q270T, and C332A mutations, the variable region of anti-PD-L1 antibody h769.T (as described in Example 4 herein, and also referred to as h769-N93T), and a human IgG1 Fc domain including an N297A mutation. This Janus PD-L1 antibody sialidase conjugate (referred to as ASC5, and including a first polypeptide chain with amino acid sequence SEQ ID NO: 205, encoded by nucleotide sequence SEQ ID NO: 208, a second polypeptide chain with amino acid sequence SEQ ID NO: 213, encoded by nucleotide sequence SEQ ID NO: 215, and a third polypeptide chain with amino acid sequence SEQ ID NO: 219, encoded by nucleotide sequence SEQ ID NO: 220) was expressed and characterized for purity using SDS-PAGE and enzymatic activity using 4MU-NeuAc as described above.

[0456] ASC5 was expressed in a 1,000 mL transfection of Expi293 human cells using the pCEP4 mammalian expression vector. The PD-L1 antibody sialidase conjugate was purified using protein A followed by cation exchange and Ceramic Hydroxyapatite chromatography, quantified with a UV-Vis spectrophotometer (NanoDrop), and examined by SDS-PAGE. ASC5 expressed well with a purity of 98% monomeric heterodimer by SEC (FIG. 39A). ASC5 was active with a Vmax of 1.4×10⁸, causing the release of sialic acid which generated fluorescence as shown in FIG. 39B.

[0457] A fifth PD-L1 antibody sialidase conjugates was constructed using Neu2 with M1D, V6Y, P62G, A93E, Q126Y, I187K, A242F, Q270T, and C332A mutations, the variable region of anti-PD-L1 antibody h769.T (as described in Example 4 herein, and also referred to as h769-N93T), and a human IgG1 Fc domain including an N297A mutation. This Janus PD-L1 antibody sialidase conjugate (referred to as ASC2, and including a first polypeptide chain with amino acid sequence SEQ ID NO: 205, encoded by nucleotide sequence SEQ ID NO: 208, a second polypeptide chain with amino acid sequence SEQ ID NO: 206, encoded by nucleotide sequence SEQ ID NO: 209, and a third polypeptide chain with amino acid sequence SEQ ID NO: 211, encoded by nucleotide sequence SEQ ID NO: 212) was expressed and characterized for purity using SDS-PAGE and enzymatic activity using 4MU-NeuAc as described above.

[0458] ASC2 was expressed in a 1,000 mL transfection of Expi293 human cells using the pCEP4 mammalian expression vector. The PD-L1 antibody sialidase conjugate was purified using protein A followed by cation exchange and Ceramic Hydroxyapatite chromatography, quantified with a UV-Vis spectrophotometer (NanoDrop), and examined by SDS-PAGE. ASC2 expressed well with a purity of 90% by SEC as shown in FIG. 40A. ASC2 was active with a Vmax of 6.05×10⁷, causing the release of sialic acid which generated fluorescence. FIG. 40B depicts the activity of ASC2 following protein A purification (ProA), after cation exchange (SP) and after Ceramic Hydroxyapatite chromatography (CHT). For comparison, the same results are also shown for ASC3. Both PD-L1 antibody sialidase conjugates demonstrated improved activity as the molecules were purified to homogeneity.

[0459] The ability of PD-L1 antibody sialidase conjugates to bind human and cynomolgus PD-L1 was confirmed. FIG. 41 depicts human PD-L1 (FIG. 41A) and cynomolgus PD-L1 (FIG. 41B) binding kinetics to selected of PD-L1 antibody sialidase conjugates as compared to h769.T-1A (as described above in Example 4 herein). KD, Kon and Kdis values for human and cynomolgus PD-L1 of the PD-L1 antibody sialidase conjugates compared to h769.T-1A are shown in TABLE 19.

TABLE 19

| hPD-L1 | KD (M) | kon(1/Ms) | kdis(1/s) | cPD-L1 | KD (M) | kon(1/Ms) | kdis(1/s) |
|---|---|---|---|---|---|---|---|
| ASC3 | 1.73 × 10⁻⁰⁹ | 4.36 × 10⁵ | 7.51 × 10⁻⁰⁴ | ASC3 | 2.26 × 10⁻⁰⁹ | 3.67 × 10⁵ | 8.21 × 10⁻⁰⁴ |
| ASC4 LOF | 1.79 × 10⁻⁰⁹ | 4.49 × 10⁵ | 7.55 × 10⁻⁰⁴ | ASC4 LOF | 1.04 × 10⁻⁰⁹ | 4.23 × 10⁵ | 3.90 × 10⁻⁰⁴ |
| ASC5 | 1.66 × 10⁻⁰⁹ | 4.33 × 10⁵ | 7.21 × 10⁻⁰⁴ | ASC5 | 1.23 × 10⁻⁰⁹ | 3.69 × 10⁵ | 4.38 × 10⁻⁰⁴ |
| h769.T-1A | 2.13 × 10⁻⁰⁹ | 3.46 × 10⁵ | 7.28 × 10⁻⁰⁴ | h769.T-1A | 1.53 × 10⁻⁰⁹ | 2.97 × 10⁵ | 4.43 × 10⁻⁰⁴ |

[0460] The ability of PD-L1 antibody sialidase conjugates to bind PD-L1 on HCC827 and NCI-H292 cells was examined next. Cells were incubated with antibody (h769.T-1A and atezolizumab) and ASC3, ASC4 LOF, and ASC5 molecules at 4° C. for 30 min. After washing with staining buffer, cells were incubated with AF647 Goat anti-human IgG(H+L) in staining buffer at 4° C. for 30 min. After 2× wash with staining buffer, cells were fixed and run on FACSCelesta. FIG. 42 depicts binding of PD-L1 antibody sialidase conjugates to HCC827 (FIG. 42A) and NCI-H292 (FIG. 42B) lung epithelial cell lines. The apparent Kd (nM) for each antibody is depicted in TABLE 20.

TABLE 20

| | Kd (nM) | Kd (nM) |
|---|---|---|
| | HCC827 | NCI-H292 |
| Atezolizumab | 0.1127* | 0.07495** |
| h769.T-1A | 0.1249** | 0.09732** |
| ASC3 | 0.2330* | 0.1925 |
| ASC4 LOF | 0.5599* | 0.4445 |
| ASC5 | 0.4554* | 0.3633 |

*= Calculated using data points up to 11 nM
**= Calculated using data points up to 3.7 nM

[0461] The ability of PD-L1 antibody sialidase conjugates to desialylate K562 and HT-29 cells was examined. Cells were incubated with ASC5 and compared to ASC4 LOF at 37° C. overnight (17 hours). HT-29 cells were lifted in Accutase at 37° C. for 10 min. After wash in staining buffer, cells were incubated in biotin-PNA and live/dead in PBS at 4° C. for 30 min. After washing with PBS, cells were incubated with AF647-Strep in staining buffer at 4° C. for 20 min. Cells were washed twice with staining buffer and run immediately. FIG. 43 depicts desialylation by PD-L1 antibody sialidase conjugates on K562 cells (FIG. 43A) and HT-29 cells (FIG. 43B).

### Example 6

[0462] This Example describes the in vivo administration of anti-PD-L1 antibody sialidase conjugates (ASC5) containing human sialidases.

[0463] Anti-PD-L1 antibody sialidase conjugates were tested in a transgenic mouse engineered to express human PD-L1 and human PD-1 in which mouse PD-L1 and mouse PD-1 have been disrupted (Biocytogen Inc.). Such double knock-in, knock-out mice were injected with a MC38 murine cancer cell line engineered to express human PD-L1. Mice, 6-8 weeks of age, were inoculated subcutaneously in the right lower flank region with either the parent murine cell line or human PD-L1 expressing tumor cells for tumor development. Mice were randomly allocated to 4 groups of 8 animals each when tumors reached 50-100 mm³, mean ˜75-100 mm³ and treated as shown in TABLE 21.

TABLE 21

| Group | Treatment | Dose | Route | Schedule |
|---|---|---|---|---|
| 1 | 001-1A isotype control | 10 mg/kg | IP | Every other day; |
| | (drug A) | | | 8 doses |
| 2 | ASC5 (drug B) | 10 mg/kg | | |
| 3 | ASC4 LOF (drug C) | 10 mg/kg | | |
| 4 | h769.T-1A (drug D) | 5 mg/kg | | |

[0464] Mice were treated via intraperitoneal injection of 10 mg/kg of ASC5 or ASC4 LOF (each as described above in Example 5 herein), 10 mg/kg of isotype control, or 5 mg/kg of h769.T-1A (as described above in Example 4 herein), and tumor volume (mm³) was recorded. Mean tumor volumes for the individual mice for the indicated treatments were determined.

[0465] As shown in FIG. 44A, mice treated with ASC5 exhibit statistically meaningful reduced tumor volumes compared to mice treated with the control or ASC4 LOF PD-L1 antibody sialidase conjugates. The reduced tumor volumes following treatment with ASC5 relative to ASC4 LOF demonstrate the importance of the sialidase activity in tumor reduction. Tumor volumes for the individual mice for the indicated treatments are shown in FIG. 44B.

### Example 7

[0466] This Example demonstrates the ability of anti-PD-L1 antibody sialidase conjugates (ASCs) to block the PD-1 PD-L1 interaction.

[0467] Two lots of ASC5 (as described above in Example 5) were tested for their ability to block a biotinylated human PD-1 Fc fusion (hPD-1-Fc) from binding to human PD-L1 (hPD-L1). ASC5 as well as atezolizumab and h769.T-1A (as described above in Example 4) were 3× titrated and mixed with hPD-1-Fc at a final concentration of 1 μg/mL. The mixture of antibody and hPD-1-Fc was loaded on to hPD-L1 coated ELISA wells for binding. ASCs or antibodies that bind the hPD-1 binding epitope on hPD-L1 will compete for binding and result in a reduction of hPD-1-Fc binding signal. The residual binding of hPD-1-Fc to hPD-L1 was detected with HRP conjugated streptavidin. The plate was developed with TMB and Stop buffer and the absorbance at 450 nm was read using a SpectraMax plate reader. A450 absorbance curves and IC₅₀s were generated using GraphPad Prism software. hPD-1-Fc only (no antibody) and buffer only (no antibody or hPD-1-Fc) were used as controls. As depicted in FIG. 45, ASC5 blocked hPD-1-Fc binding to hPD-L1. IC₅₀s for the two lots of ASC5 were 3.319 nM and 3.134 nM, which was slightly reduced relative to atezolizumab (IC₅₀ of 1.305 nM) or h769.T-1A (IC₅₀ of 1.444 nM). It is contemplated that the difference in IC₅₀ values was due to the difference between the antibody and ASC formats (e.g., ASC5 has only a single PD-L1 binding site while atezolizumab and h769.T-1A each have two PD-L1 binding sites).

[0468] ASC5 was also incubated with (i) engineered CHO-K1 cells expressing human PD-L1 and TCR activating protein and (ii) Jurkat T cells expressing human PD-1, TCR and a luciferase reporter driven by an NFAT response element. Absent intervention, PD-L1 interacting with PD-1 inhibits TCR-mediated luminescence, while blockade of the PD-L1/PD-1 interaction results in a luminescent signal. A luciferase substrate was added after 6 hours of incubation and luminescence was measured. Relative light units (RLU) were calculated by subtracting background (substrate and media only) from assay wells. Fold induction was calculated by dividing the RLU of induced cells minus background by the RLU of a no antibody control minus background (Fold induction=RLU (induced−background)/RLU (no antibody control−background)). Atezolizumab and h769.T-1A were used as positive controls, and each produced a fold induction of 4 to 5 over a range of 0.1 to 10 μg/mL in this assay. As shown in FIG. 46, three different lots of ASC5 caused a dose dependent increase in luminescence, indicating that the ASC is capable of disrupting the PD-L1/PD-1 interaction. EC₅₀s for the three lots of ASC5 were 11.54, 11.59 and 12.71 nM. EC₅₀s for atezolizumab and h769.T-1A were 0.474 nM and 0.5596 nM, respectively. It is contemplated that the difference in EC₅₀ values was due to the difference between the antibody and ASC formats (e.g., ASC5 has only a single PD-L1 binding site while atezolizumab and h769.T-1A each have two PD-L1 binding sites).

### Example 8

[0469] This Example demonstrates the ability of anti-PD-L1 antibody sialidase conjugates (ASCs) to remove sialic acid from the surface of human tumor cell lines and primary immune cells.

[0470] Following incubation with ASCs, various cell types were stained with α2,3 SiaFind (Lectenz) and PNA lectin. Sialidase activity and removal of α2,3 sialic acid linkages from the cell surface results in decreased staining by α2,3 SiaFind. Sialidase activity and exposure of the underlying galactose sugar upon sialic acid cleavage results in increased staining by PNA lectin.

[0471] ASCs were tested on (i) BT-20, HT-29, and SK-BR-3 tumor cell lines, (ii) monocytic-derived dendritic cells (mDCs) generated from two separate healthy donors by treating isolated CD14+ monocytes with 50 ng/ml of both GM-CSF and IL-4, and (iii) PBMCs from two separate healthy donors thawed from frozen stocks. For mDCs and PBMCs only, cells were either stimulated with 300 ng/ml Pam3CSK4 or left unstimulated. For tumor cells, no stimulation was added. Cells were treated overnight (˜15 hours) with prepared 1:3 serial dilutions of ASC5 or ASC4 LOF (each as described above in Example 5), or isotype control with the highest concentration starting at 2,000 μg/ml. An 18-point curve was generated for each cell with each condition and each ASC or isotype concentration for each cell condition was completed in duplicate. After overnight treatment, tumor cells only were treated with Accutase for 15 minutes at 37° C. to loosen cells off of the plate. All cells were washed with PBS and stained with Zombie Aqua cell viability kit at 1:1000 dilution in PBS on ice for 15 minutes to identify live cell populations. Subsequent cell washes using cell staining buffer (Biolegend) were completed between each blocking and staining step including after the cell viability stain. Additionally, staining and resuspension steps were also completed with cell staining buffer. Primary immune cells only were treated with Fc Receptor blocking agent FcX (Biolegend) at 1:20 dilution on ice for 15 minutes. All cells were stained with a mixture of PNA-AF647 (15 μg/ml) and SureLight488-α2,3 SiaFind (30 μg/ml; Lectenz) on ice for 30 minutes. Tumor cells were resuspended and immediately read on BD FACS Celesta via BD Diva Software.

[0472] Monocytic DCs were stained with BV421-CD11c and PE-DC-Sign while PBMCs were stained with PE-CD8, PercpCy5.5-CD56, BV421-CD14, BV650-CD19, and BV785-CD3 (Biolegend) on ice for 30 minutes at a 1:40 dilution for all staining antibodies (Biolegend). Primary immune cells were resuspended and immediately read on BD FACS Celesta via BD Diva Software. FloJo software was used to gate out non-debris, single, and live cells. Additionally, mDCs were gated as CD11c+/DC-Sign+ while PBMC populations were separated as CD56hi and CD56int NK cells, CD14hi and CD14int monocytic cells, and CD3/CD8 T Cells. The gMFI of alpha 2,3 SiaFind (Lectenz) and PNA for each population was put into GraphPad Prism software to generate IC₅₀ (TABLE 22) and EC₅₀ (TABLE 23) values, respectively.

[0473] ASC5 desialylated both tumor cells and primary human cells as measured by a reduction in α2,3 SiaFind staining, with IC₅₀s between 10 and 100 μg/mL. Following Pam3K stimulation of the primary human cell populations, a clear reduction in IC₅₀s was observed in mDCs from two different donors by 3 orders of magnitude as well as reduced IC₅₀s in CD14hi and CD14int monocytes (TABLE 22). Pam3K stimulation was also shown to increase PD-L1 expression in these cell types which would correlate with the reduced IC₅₀s. Increased PD-L1 expression leads to increased desialylation efficiency of ASC5.

[0474] Likewise, ASC5 desialylated both tumor cells and primary human cells as measured by an increase in PNA staining, with EC₅₀s between −100 and 1,000 μg/mL. Following Pam3K stimulation of the primary human cell populations, a clear reduction in EC₅₀s was observed in mDCs from two different donors (TABLE 23). Pam3K stimulation was also shown to increase PD-L1 expression in these cell types which appears to correlate with the reduced EC₅₀s. Increased PD-L1 expression appears to lead to increased desialylation efficiency of ASC5.

TABLE 22
IC₅₀ Measured by α2,3 SiaFind-SL488 Staining

| Cell Category | | IC₅₀ | |
|---|---|---|---|
| (Donor if Applicable) | Cell | No Stim | Pam3K Stim |
| Tumor Cells (NA) | BT-20 | 90.26 | NA |
| | HT-29 | 68.84 | NA |
| | SK-BR-3 | 52.53 | NA |
| Differentiated Cells (Donor 1) | mDCs | 22.31 | 0.02999 |
| Differentiated Cells (Donor 2) | mDCs | 17.81 | 0.02217 |
| PBMCs (Donor 3) | CD14hi Monocytes | 19.35 | 3.468 |
| | CD14int Monocytes | 14.82 | 1.223 |
| | CD56hi NK Cells | 60.11 | 76.14 |
| | CD56int NK Cells | 31.08 | 22.81 |
| | CD8 T Cells | 51.09 | 63.62 |
| PBMCs (Donor 4) | CD14hi Monocytes | 8.998 | 3.633 |
| | CD14int Monocytes | 6.472 | 3.385 |
| | CD56hi NK Cells | 10.92 | 5.329 |
| | CD56int NK Cells | 13.24 | 10.17 |
| | CD8 T Cells | 9.435 | 13.86 |

TABLE 23
EC₅₀ Measured by PNA-AF647 Staining

| Cell Category | | EC₅₀ | |
|---|---|---|---|
| (Donor if Applicable) | Cell | No Stim | Pam3K Stim |
| Tumor Cells (NA) | BT-20 | 1769 | NA |
| | HT-29 | 1102 | NA |
| | SK-BR-3 | 1549 | NA |
| Differentiated Cells (Donor 1) | mDCs | 2353 | 511.1 |
| Differentiated Cells (Donor 2) | mDCs | 79557 | 5847 |
| PBMCs (Donor 3) | CD14hi Monocytes | 86.15 | 91.12 |
| | CD14int Monocytes | 1435 | 3612 |
| | CD56hi NK Cells | 248.3 | 542.8 |
| | CD56int NK Cells | 257.8 | 252.9 |
| | CD8 T Cells | 617 | 628.2 |
| PBMCs (Donor 4) | CD14hi Monocytes | 168.3 | 162 |
| | CD14int Monocytes | 1212 | 2272 |
| | CD56hi NK Cells | 225.9 | 229 |
| | CD56int NK Cells | 243 | 603.6 |
| | CD8 T Cells | 917.2 | 905.3 |

### Example 9

[0475] This Example demonstrates the impact of anti-PD-L1 antibody sialidase conjugates (ASCs) on cytokine release in a human dendritic cell and T cell coculture experiment.

[0476] CD14+ monocyte-derived dendritic cells were generated by a 6-day culture in GM-CSF and IL-4 (50 ng/ml each) and co-incubated with allogeneic T cells at 1:2 DC:T ratio in the presence of test articles for 3 days. Supernatants were collected for cytokine analysis by LEGENDplex 13-plex panel. Each data point represents a separate DC-T donor pair (for each test condition two independent experiments were conducted that each included four replicates). ASC5 (as described above in Example 5) was used at 700 nM (100 mg/mL), h769.T-1A (as described above in Example 4) and atezolizumab were used at 70 nM (10 mg/mL), and isotype control was used at 100 mg/mL. FIG. 47A depicts the fold change in IL-2 following treatment with ASC5, h769.T-1A, and atezolizumab compared to isotype control. FIG. 47B, FIG. 47C, and FIG. 47D show similar data for IFN-γ, IL-8 and MCP1, respectively. All four cytokines increased following ASC5 treatment by more than 2 fold, and the increase was at least as much as following treatment with h769.T-1A or atezolizumab.

### Example 10

[0477] This Example describes the in vivo administration of anti-PD-L1 antibody sialidase conjugates (ASCs) containing human sialidases.

[0478] ASC5 (as described above in Example 5) was tested in a transgenic C57BL6 mouse engineered to express human PD-L1 and human PD-1 in which mouse PD-L1 and mouse PD-1 have been disrupted (Biocytogen Inc.). Mice were injected with a MC38 murine cancer cell line engineered to express human PD-L1. Mice, 6-9 weeks of age, were inoculated subcutaneously in the right lower flank region with tumor cells for tumor development. Mice were randomly allocated to groups of 8 animals each when tumors reached 90-136 mm³, mean˜109 mm³

[0479] Mice were treated via intraperitoneal injection of ASC5 at either 1, 3, 10, or 30 mg/kg, atezolizumab at 0.5 or 5 mg/kg, h769.T-1A (as described above in Example 4) at 5 mg/kg, or isotype control at 30 mg/kg, and tumor volume (mm³) was recorded. FIG. 48A shows tumor growth through Day 18. FIG. 48B is an analysis of the Day 18 data, demonstrating a significant reduction in tumor growth upon administration of ASC5 at 30 mg/kg, comparable to the response of atezolizumab and h769.T-1A at 5 mg/kg. TABLE 24 depicts tumor growth inhibition (TGI_{TV}) calculated at day 18 for each treatment. TGI_{TV}={1−(TV_{test group}−TV_{test group at day 0})/(TV_{control group}−TV_{control group at day 0})}×100%.

TABLE 24

| Treatment | TGI-_{TV} |
|---|---|
| 0.5 mg/kg atezolizumab | 11.1% |
| 5 mg/kg atezolizumab | 71.8% |
| 5 mg/kg h769. T-1A | 82.1% |
| 1 mg/kg ASC5 | 5.7% |
| 3 mg/kg ASC5 | 21.4% |
| 10 mg/kg ASC5 | 11.1% |
| 30 mg/kg ASC5 | 64.4% |

[0480] A CT26 mouse tumor line engineered to express human PD-L1 was grown as a syngeneic subcutaneous tumor in a transgenic BALB/c mouse engineered to express human PD-L1 and human PD-1 and in which mouse PD-L1 and mouse PD-1 have been disrupted (Gempharmatech Inc.). Mice, 8-9 weeks of age, were inoculated subcutaneously in the right lower flank region with tumor cells for tumor development. Mice were randomly allocated to three groups of six animals each when tumors reached 90-120 mm³, with a group mean of 104.06-104.36 mm³.

[0481] Mice were treated via intraperitoneal injection of ASC5 (as described above in Example 5; 10 mg/kg), h769.T-1A (as described above in Example 4; 5 mg/kg), or isotype control (10 mg/kg), and tumor volume (mm³) was recorded. FIG. 49A shows percent tumor growth inhibition (TGI) through Day 18. FIG. 49B is an analysis of the Day 18 data, demonstrating significant reduction in tumor growth upon administration of ASC5, which was greater than the reduction for h769.T-1A.

[0482] A dose response experiment with ASC5 was carried out in the CT26 mouse model. Mice were treated via intraperitoneal injection at 3, 10 and 30 mg/kg of ASC5, 10 mg/kg ASC4 (LOF), 5 mg/kg atezolizumab, and 30 mg/kg isotype control. 6 mice per group (7-9 weeks of age at inoculation) were randomized when tumors reached 76-125 mm 3 (group mean 102-103 mm³). The humane endpoint was at 3,000 mm³ tumor volume. FIG. 50A shows tumor growth inhibition (TGI) through Day 16. FIG. 50B is an analysis of the Day 16 data demonstrating significant dose dependent reduction in tumor growth upon administration of ASC5.

### INCORPORATION BY REFERENCE

[0483] The entire disclosure of each of the patent and scientific documents referred to herein is incorporated by reference for all purposes.

### EQUIVALENTS

[0484] The invention may be embodied in other specific forms without departing from the spirit or essential characteristics thereof. The foregoing embodiments are therefore to be considered in all respects illustrative rather than limiting on the invention described herein. Scope of the invention is thus indicated by the appended claims rather than by the foregoing description, and all changes that come within the meaning and range of equivalency of the claims are intended to be embraced therein.

The application's sequence listing, which the Patent Office published only in electronic form, follows.

SEQUENCE LISTING (259 sequences)

SEQ ID NO: 1 - protein, 380 aa, Homo sapiens
MASLPVLQKESVFQSGAHAYRIPALLYLPGQQSLLAFAEQRASKKDEHAELIVLRRGDYDAPTHQVQWQAQEVVAQARLDGHRSMNPCPLYDAQTGTLFLFFIAIPGQVTEQQQLQTRANVTRLCQVTSTDHGRTWSSPRDLTDAAIGPAYREWSTFAVGPGHCLQLHDRARSLVVPAYAYRKLHPIQRPIPSAFCFLSHDHGRTWARGHFVAQDTLECQVAEVETGEQRVVTLNARSHLRARVQAQSTNDGLDFQESQLVKKLVEPPPQGCQGSVISFPSPRSGPGSPAQWLLYTHPTHSWQRADLGAYLNPRPPAPEAWSEPVLLAKGSCAYSDLQSMGTGPDGSPLFGCLYEANDYEEIVFLMFTLKQAFPAEYLPQ

SEQ ID NO: 2 - protein, 385 aa, Mus musculus
MEDLRPMATCPVLQKETLFRTGVHAYRIPALLYLKKQKTLLAFAEKRASKTDEHAELIVLRRGSYNEATNRVKWQPEEVVTQAQLEGHRSMNPCPLYDKQTKTLFLFFIAVPGRVSEHHQLHTKVNVTRLCCVSSTDHGRTWSPIQDLTETTIGSTHQEWATFAVGPGHCLQLRNPAGSLLVPAYAYRKLHPAQKPTPFAFCFISLDHGHTWKLGNFVAENSLECQVAEVGTGAQRMVYLNARSFLGARVQAQSPNDGLDFQDNRVVSKLVEPPHGCHGSVVAFHNPISKPHALDTWLLYTHPTDSRNRTNLGVYLNQMPLDPTAWSEPTLLAMGICAYSDLQNMGQGPDGSPQFGCLYESGNYEEIIFLIFTLKQAFPTVFDAQ

SEQ ID NO: 3 - protein, 5 aa, Mus musculus
EDLRP

SEQ ID NO: 4 - protein, 6 aa, Mus musculus
MEDLRP

SEQ ID NO: 5 - protein, 227 aa, Artificial Sequence
  Description of Artificial Sequence: Synthetic polypeptide
DKTHTCPPCPAPELLGGPSVFLFPPKPKDTLMISRTPEVTCVVVDVSHEDPEVKFNWYVDGVEVHNAKTKPREEQYNSTYRVVSVLTVLHQDWLNGKEYKCKVSNKALPAPIEKTISKAKGQPREPQVYTLPPSREEMTKNQVSLTCLVKGFYPSDIAVEWESNGQPENNYKTTPPVLDSDGSFFLYSKLTVDKSRWQQGNVFSCSVMHEALHNHYTQKSLSLSPGK

SEQ ID NO: 6 - DNA, 1143 bp, Salmonella typhimurium
acagtggaaaagtccgtggtgttcaaggccgagggcgagcacttcaccgaccagaaaggcaataccatcgtcggctctggcagcggcggcaccaccaagtactttagaatccccgccatgtgcaccaccagcaagggcaccattgtggtgttcgccgacgccagacacaacaccgccagcgatcagagcttcatcgataccgctgccgccagatctaccgatggcggcaagacctggaacaagaagatcgccatctacaacgaccgcgtgaacagcaagctgagcagagtgatggaccctacctgcatcgtggccaacatccagggcagagaaaccatcctggtcatggtcggaaagtggaacaacaacgataagacctggggcgcctacagagacaaggcccctgataccgattgggacctcgtgctgtacaagagcaccgatgacggcgtgaccttcagcaaggtggaaacaaacatccacgacatcgtgaccaagaacggcaccatctctgccatgctcggcggcgttggatctggcctgcaactgaatgatggcaagctggtgttccccgtgcagatggtccgaacaaagaatatcaccaccgtgctgaataccagcttcatctacagcaccgacggcatcacatggtccctgcctagcggctactgtgaaggctttggcagcgagaacaacatcatcgagttcaacgccagcctggtcaacaacatccggaacagcggcctgcggagaagcttcgagacaaaggacttcggaaagacgtggaccgagtttcctccaatggacaagaaggtggacaaccggaaccacggcgtgcagggcagcacaatcacaatccctagcggcaacaaactggtggccgctcactctagcgcccagaacaagaacaacgactacaccagaagcgacatcagcctgtacgcccacaacctgtacagcggcgaagtgaagctgatcgacgacttctaccccaaagtgggcaatgccagcggagccggctacagctgtctgagctaccggaaaaatgtggacaaagaaaccctgtacgtggtgtacgaggccaacggcagcatcgagtttcaggacctgagcagacatctgcccgtgatcaagagctacaac

SEQ ID NO: 7 - protein, 364 aa, Homo sapiens
ENDFGLVQPLVTMEQLLWVSGRQIGSVDTFRIPLITATPRGTLLAFAEARKMSSSDEGAKFIALRRSMDQGSTWSPTAFIVNDGDVPDGLNLGAVVSDVETGVVFLFYSLCAHKAGCQVASTMLVWSKDDGVSWSTPRNLSLDIGTEVFAPGPGSGIQKQREPRKGRLIVCGHGTLERDGVFCLLSDDHGASWRYGSGVSGIPYGQPKQENDFNPDECQPYELPDGSVVINARNQNNYHCHCRIVLRSYDACDTLRPRDVTFDPELVDPVVAAGAVVTSSGIVFFSNPAHPEFRVNLTLRWSFSNGTSWRKETVQLWPGPSGYSSLATLEGSMDGEEQAPQLYVLYEKGRNHYTESISVAKISV

SEQ ID NO: 8 - protein, 428 aa, Homo sapiens
MEEVTTCSFNSPLFRQEDDRGITYRIPALLYIPPTHTFLAFAEKRSTRRDEDALHLVLRRGLRIGQLVQWGPLKPLMEATLPGHRTMNPCPVWEQKSGCVFLFFICVRGHVTERQQIVSGRNAARLCFIYSQDAGCSWSEVRDLTEEVIGSELKHWATFAVGPGHGIQLQSGRLVIPAYTYYIPSWFFCFQLPCKTRPHSLMIYSDDLGVTWHHGRLIRPMVTVECEVAEVTGRAGHPVLYCSARTPNRCRAEALSTDHGEGFQRLALSRQLCEPPHGCQGSVVSFRPLEIPHRCQDSSSKDAPTIQQSSPGSSLRLEEEAGTPSESWLLYSHPTSRKQRVDLGIYLNQTPLEAACWSRPWILHCGPCGYSDLAALEEEGLFGCLFECGTKQECEQIAFRLFTHREILSHLQGDCTSPGRNPSQFKSN

SEQ ID NO: 9 - protein, 461 aa, Homo sapiens
MRPADLPPRPMEESPASSSAPTETEEPGSSAEVMEEVTTCSFNSPLFRQEDDRGITYRIPALLYIPPTHTFLAFAEKRSTRRDEDALHLVLRRGLRIGQLVQWGPLKPLMEATLPGHRTMNPCPVWEQKSGCVFLFFICVRGHVTERQQIVSGRNAARLCFIYSQDAGCSWSEVRDLTEEVIGSELKHWATFAVGPGHGIQLQSGRLVIPAYTYYIPSWFFCFQLPCKTRPHSLMIYSDDLGVTWHHGRLIRPMVTVECEVAEVTGRAGHPVLYCSARTPNRCRAEALSTDHGEGFQRLALSRQLCEPPHGCQGSVVSFRPLEIPHRCQDSSSKDAPTIQQSSPGSSLRLEEEAGTPSESWLLYSHPTSRKQRVDLGIYLNQTPLEAACWSRPWILHCGPCGYSDLAALEEEGLFGCLFECGTKQECEQIAFRLFTHREILSHLQGDCTSPGRNPSQFKSN

SEQ ID NO: 10 - protein, 484 aa, Homo sapiens
MGVPRTPSRTVLFERERTGLTYRVPSLLPVPPGPTLLAFVEQRLSPDDSHAHRLVLRRGTLAGGSVRWGALHVLGTAALAEHRSMNPCPVHDAGTGTVFLFFIAVLGHTPEAVQIATGRNAARLCCVASRDAGLSWGSARDLTEEAIGGAVQDWATFAVGPGHGVQLPSGRLLVPAYTYRVDRRECFGKICRTSPHSFAFYSDDHGRTWRCGGLVPNLRSGECQLAAVDGGQAGSFLYCNARSPLGSRVQALSTDEGTSFLPAERVASLPETAWGCQGSIVGFPAPAPNRPRDDSWSVGPGSPLQPPLLGPGVHEPPEEAAVDPRGGQVPGGPFSRLQPRGDGPRQPGPRPGVSGDVGSWTLALPMPFAAPPQSPTWLLYSHPVGRRARLHMGIRLSQSPLDPRSWTEPWVIYEGPSGYSDLASIGPAPEGGLVFACLYESGARTSYDEISFCTFSLREVLENVPASPKPPNLGDKPRGCCWPS

SEQ ID NO: 11 - protein, 496 aa, Homo sapiens
MMSSAAFPRWLSMGVPRTPSRTVLFERERTGLTYRVPSLLPVPPGPTLLAFVEQRLSPDDSHAHRLVLRRGTLAGGSVRWGALHVLGTAALAEHRSMNPCPVHDAGTGTVFLFFIAVLGHTPEAVQIATGRNAARLCCVASRDAGLSWGSARDLTEEAIGGAVQDWATFAVGPGHGVQLPSGRLLVPAYTYRVDRRECFGKICRTSPHSFAFYSDDHGRTWRCGGLVPNLRSGECQLAAVDGGQAGSFLYCNARSPLGSRVQALSTDEGTSFLPAERVASLPETAWGCQGSIVGFPAPAPNRPRDDSWSVGPGSPLQPPLLGPGVHEPPEEAAVDPRGGQVPGGPFSRLQPRGDGPRQPGPRPGVSGDVGSWTLALPMPFAAPPQSPTWLLYSHPVGRRARLHMGIRLSQSPLDPRSWTEPWVIYEGPSGYSDLASIGPAPEGGLVFACLYESGARTSYDEISFCTFSLREVLENVPASPKPPNLGDKPRGCCWPS

SEQ ID NO: 12 - protein, 5 aa, Homo sapiens
MASLP

SEQ ID NO: 13 - protein, 4 aa, Homo sapiens
ASLP

SEQ ID NO: 14 - protein, 8 aa, Salmonella typhimurium
TVEKSVVF

SEQ ID NO: 15 - protein, 12 aa, Homo sapiens
GDYDAPTHQVQW

SEQ ID NO: 16 - protein, 8 aa, Homo sapiens
SMDQGSTW

SEQ ID NO: 17 - protein, 8 aa, Salmonella typhimurium
STDGGKTW

SEQ ID NO: 18 - protein, 8 aa, Homo sapiens
PRPPAPEA

SEQ ID NO: 19 - protein, 8 aa, Homo sapiens
QTPLEAAC

SEQ ID NO: 20 - protein, 9 aa, Homo sapiens
NPRPPAPEA

SEQ ID NO: 21 - protein, 7 aa, Unknown
  Description of Unknown: Recombinant mutant human sialidase substitution sequence
SQNDGES

SEQ ID NO: 22 - protein, 7 aa, Unknown
  Description of Unknown: Recombinant mutant human sialidase substitution sequence
LSHSLST

SEQ ID NO: 23 - DNA, 1092 bp, Homo sapiens
gagaacgactttggactggtgcagcctctggtcaccatggaacagctgctgtgggtttccggcagacagatcggcagcgtggacaccttcagaatccctctgatcaccgccacacctagaggcaccctgctggcctttgccgaggccagaaagatgagcagctctgacgagggcgccaagtttattgccctgaggcggtctatggaccagggctctacatggtcccctaccgccttcatcgtgaacgatggcgacgtgcccgatggcctgaatctgggagctgtggtgtccgatgtggaaaccggcgtggtgttcctgttctacagcctgtgtgcccacaaggccggttgtcaggtggccagcacaatgctcgtgtggtccaaggacgacggcgtgtcctggtctacccctagaaacctgagcctggacatcggcaccgaagtgtttgctccaggacctggctctggcatccagaagcagagagagcccagaaagggcagactgatcgtgtgtggccacggcacccttgagagagatggcgttttctgcctgctgagcgacgatcatggcgcctcttggagatacggcagcggagtgtctggaatcccttacggccagcctaagcaagagaacgatttcaaccccgacgagtgccagccttacgagctgcctgatggcagcgtcgtgatcaacgcccggaaccagaacaactaccactgccactgccggatcgtgctgagaagctacgacgcctgcgataccctgcggcctagagatgtgaccttcgatcctgagctggtggaccctgttgttgccgctggtgccgtcgtgacatctagcggcatcgtgttcttcagcaaccctgctcaccccgagttcagagtgaatctgaccctgcggtggtccttcagcaatggcacaagctggcggaaagaaaccgtgcagctttggcctggacctagcggctactcttctctggctacactggaaggcagcatggacggcgaagaacaggcccctcagctgtacgtgctgtacgagaagggcagaaaccactacaccgagagcatcagcgtggccaagatcagcgtt

SEQ ID NO: 24 - DNA, 1140 bp, Homo sapiens
atggccagcctgcctgtgctgcagaaagaaagcgtgttccagtctggcgcccacgcctacagaattcccgctctgctgtatctgccaggccagcagtctctgctggctttcgctgaacagcgggccagcaagaaggatgagcacgccgaactgatcgtgctgcggagaggcgattacgacgcccctacacatcaggtgcagtggcaggctcaagaggtggtggctcaggctagactggacggccacagatctatgaacccctgtcctctgtacgatgcccagaccggcacactgtttctgttctttatcgctatccccggccaagtgaccgagcagcagcagctgcagacaagagccaacgtgaccagactgtgtcaagtgacctccaccgaccacggcagaacctggtctagccctagagatctgaccgacgccgccatcggacctgcctatagagagtggtccaccttcgccgttggacctggacactgtctccagctgcacgacagggctagatctctggtggtgcctgcctacgcctatagaaagctgcaccccatccagcggcctattcctagcgccttctgctttctgagccacgatcacggcaggacatgggccagaggacatttcgtggcccaggacacactggaatgccaggtggccgaagtggaaaccggcgagcagagagtcgtgaccctgaacgccagatctcacctgagagccagagtgcaggcccagagcacaaacgacggcctggatttccaagagagccagctggtcaagaaactggtggaacctcctccacagggctgtcagggaagcgtgatcagctttccatctcctagaagcggccctggctctcctgctcagtggctgctgtatacacaccccacacacagctggcagagagccgatctgggcgcctacctgaatcctagacctcctgctcctgaggcttggagcgaacctgttctgctggccaagggcagctgtgcctacagcgatctgcagtctatgggcacaggccctgatggcagccctctgtttggctgtctgtacgaggccaacgactacgaagagatcgtgttcctgatgttcaccctgaagcaggcctttccagccgagtacctgcctcaa

SEQ ID NO: 25 - DNA, 1284 bp, Homo sapiens
atggaggaagtgaccacctgtagcttcaacagccctctgttccggcaagaggacgaccggggcatcacctacagaatccctgctctgctgtacatccctcctacacacacctttctggccttcgccgagaagcggagcaccagacgagatgaagatgccctgcacctggtgctgagaagaggcctgagaatcggacagctggtgcagtggggacctctgaagcctctgatggaagccacactgcccggccacagaaccatgaatccttgtcctgtgtgggagcagaaaagcggctgcgtgttcctgttcttcatctgcgtgcggggccacgtgaccgagagacagcaaatcgtgtccggcagaaacgccgccagactgtgcttcatctacagccaggatgccggctgctcttggagcgaagttcgggatctgaccgaagaagtgatcggcagcgagctgaagcactgggccacatttgctgttggccctggccacggaatccagctgcaatctggcagactggtcatccccgcctacacctactatatccccagctggttcttctgcttccaactgccttgcaagacccggcctcacagcctgatgatctacagcgacgatctgggcgtgacatggcaccacggcagactgatcagacccatggtcaccgtggaatgcgaggtggccgaagtgacaggcagagctggacaccctgtgctgtactgctctgccagaacacccaaccggtgtagagccgaggctctgtctacagatcacggcgagggctttcagagactggccctctctagacagctgtgcgaacctcctcatggctgtcagggcagcgtggtgtccttcagacctctggaaatccctcaccggtgccaggacagcagctctaaggatgcccctaccatccagcagtctagccctggcagcagcctgagactggaagaggaagccggaacacctagcgagagctggctgctgtactctcaccccaccagcagaaagcagagagtggacctgggcatctacctgaatcagacccctctggaagccgcctgttggagcagaccttggattctgcactgtggcccttgcggctactctgatctggccgctctggaagaagagggcctgttcggctgcctgtttgagtgcggcacaaagcaagagtgcgagcagatcgccttccggctgttcacccacagagagatcctgagccatctgcagggcgactgcacaagcccaggcagaaatcccagccagttcaagagcaac

SEQ ID NO: 26 - DNA, 1452 bp, Homo sapiens
atgggcgtgcccagaacacccagcagaaccgtgctgttcgagagagagaggaccggcctgacctacagagtgccttctctgctgcctgtgcctcctggacctacactgctggccttcgtggaacagagactgagccccgatgattctcacgcccacagactggtgctgagaagaggaacactggctggcggctctgttagatggggagcactgcatgtgctgggcacagctgctcttgccgagcacagatccatgaatccctgtcctgtgcacgacgccggaaccggcacagtgtttctgttctttatcgccgtgctgggccacacacctgaggccgttcaaattgccaccggcagaaatgccgccagactgtgttgtgtggcctccagagatgccggcctgtcttggggatctgccagagatctgaccgaggaagccattggcggagccgttcaggattgggccacatttgctgttggacctggacacggcgtgcagctgccaagtggtagactgctggtgcctgcctacacatacagagtggatcggagagagtgcttcggaaagatctgccggacaagccctcacagcttcgccttctactccgacgatcacggccggacttggagatgtggtggcctggtgcctaatctgagaagcggcgaatgtcaactggccgccgttgatggtggacaggctggcagcttcctgtactgcaacgccagatctcctctgggctctagagtgcaggccctgtctaccgatgagggcaccagttttctgcccgccgaaagagttgcctctctgcctgaaacagcctggggctgtcagggctctatcgtgggatttcctgctcctgctccaaacagaccccgggacgattcttggagtgtcggccctggatctccactgcagcctccattgcttggaccaggcgttcacgagccacctgaagaggctgccgttgatcctagaggcggacaagttcctggcggcccttttagcagactgcagccaagaggcgacggccctagacaacctggaccaagacctggcgtcagcggagatgttggctcttggacactggccctgcctatgccttttgccgctcctcctcagtctcctacctggctgctgtactctcaccctgttggcagacgggccagactgcacatgggcatcagactgtctcagagccctctggaccccagaagctggacagagccttgggtcatctatgagggccctagcggctacagcgatctggcctctattggcccagctcctgaaggcggactggtgttcgcttgtctgtatgagagcggcgccagaaccagctacgacgagatcagcttctgcaccttcagcctgcgcgaggtgctggaaaatgtgcccgcctctcctaagcctcctaacctgggcgataagcctagaggctgttgctggccatct

SEQ ID NO: 27 - protein, 47 aa, Homo sapiens
MTGERPSTALPDRRWGPRILGFWGGCRVWVFAAIFLLLSLAASWSKA

SEQ ID NO: 28 - protein, 22 aa, Unknown
  Description of Unknown: N-terminal signal peptide sequence
MDMRVPAQLLGLLLLWLPGARC

SEQ ID NO: 29 - protein, 4 aa, Unknown
  Description of Unknown: C-terminal lysosomal signal motif sequence
YGTL

SEQ ID NO: 30 - protein, 382 aa, Salmonella typhimurium
MTVEKSVVFKAEGEHFTDQKGNTIVGSGSGGTTKYFRIPAMCTTSKGTIVVFADARHNTASDQSFIDTAAARSTDGGKTWNKKIAIYNDRVNSKLSRVMDPTCIVANIQGRETILVMVGKWNNNDKTWGAYRDKAPDTDWDLVLYKSTDDGVTFSKVETNIHDIVTKNGTISAMLGGVGSGLQLNDGKLVFPVQMVRTKNITTVLNTSFIYSTDGITWSLPSGYCEGFGSENNIIEFNASLVNNIRNSGLRRSFETKDFGKTWTEFPPMDKKVDNRNHGVQGSTITIPSGNKLVAAHSSAQNKNNDYTRSDISLYAHNLYSGEVKLIDDFYPKVGNASGAGYSCLSYRKNVDKETLYVVYEANGSIEFQDLSRHLPVIKSYN

SEQ ID NO: 31 - protein, 232 aa, Artificial Sequence
  Description of Artificial Sequence: Synthetic polypeptide
EPKSCDKTHTCPPCPAPELLGGPSVFLFPPKPKDTLMISRTPEVTCVVVDVSHEDPEVKFNWYVDGVEVHNAKTKPREEQYNSTYRVVSVLTVLHQDWLNGKEYKCKVSNKALPAPIEKTISKAKGQPREPQVYTLPPSREEMTKNQVSLTCLVKGFYPSDIAVEWESNGQPENNYKTTPPVLDSDGSFFLYSKLTVDKSRWQQGNVFSCSVMHEALHNHYTQKSLSLSPGK

SEQ ID NO: 32 - protein, 227 aa, Artificial Sequence
  Description of Artificial Sequence: Synthetic polypeptide
DKTHTCPPCPAPELLGGPSVFLFPPKPKDTLMISRTPEVTCVVVDVSHEDPEVKFNWYVDGVEVHNAKTKPREEQYNSTYRVVSVLTVLHQDWLNGKEYKCKVSNKALPAPIEKTISKAKGQPREPQVYTLPPSREEMTKNQVSLTCLVKGFYPSDIAVEWESNGQPENNYKTTPPVLDSDGSFFLTSKLTVDKSRWQQGNVFSCSVMHEALHNHYTQKSLSLSPGK

SEQ ID NO: 33 - protein, 232 aa, Artificial Sequence
  Description of Artificial Sequence: Synthetic polypeptide
EPKSCDKTHTCPPCPAPELLGGPSVFLFPPKPKDTLMISRTPEVTCVVVDVSHEDPEVKFNWYVDGVEVHNAKTKPREEQYNSTYRVVSVLTVLHQDWLNGKEYKCKVSNKALPAPIEKTISKAKGQPREPQVYTLPPSREEMTKNQVSLYCLVKGFYPSDIAVEWESNGQPENNYKTTPPVLDSDGSFFLYSKLTVDKSRWQQGNVFSCSVMHEALHNHYTQKSLSLSPGK

SEQ ID NO: 34 - DNA, 1383 bp, Homo sapiens
atgagacctgcggacctgcccccgcgccccatggaagaatccccggcgtccagctctgccccgacagagacggaggagccggggtccagtgcagaggtcatggaagaagtgacaacatgctccttcaacagccctctgttccggcaggaagatgacagagggattacctaccggatcccagccctgctctacataccccccacccacaccttcctggcctttgcagagaagcgttctacgaggagagatgaggatgctctccacctggtgctgaggcgagggttgaggattgggcagttggtacagtgggggcccctgaagccactgatggaagccacactaccggggcatcggaccatgaacccctgtcctgtatgggagcagaagagtggttgtgtgttcctgttcttcatctgtgtgcggggccatgtcacagagcgtcaacagattgtgtcaggcaggaatgctgcccgcctttgcttcatctacagtcaggatgctggatgttcatggagtgaggtgagggacttgactgaggaggtcattggctcagagctgaagcactgggccacatttgctgtgggcccaggtcatggcatccagctgcagtcagggagactggtcatccctgcgtatacctactacatcccttcctggttcttttgcttccagctaccatgtaaaaccaggcctcattctctgatgatctacagtgatgacctaggggtcacatggcaccatggtagactcattaggcccatggttacagtagaatgtgaagtggcagaggtgactgggagggctggccaccctgtgctatattgcagtgcccggacaccaaacaggtgccgggcagaggcgctcagcactgaccatggtgaaggctttcagagactggccctgagtcgacagctctgtgagcccccacatggttgccaagggagtgtggtaagtttccggcccctggagatcccacataggtgccaggactctagcagcaaagatgcacccaccattcagcagagctctccaggcagttcactgaggctggaggaggaagctggaacaccgtcagaatcatggctcttgtactcacacccaaccagtaggaaacagagggttgacctaggtatctatctcaaccagacccccttggaggctgcctgctggtcccgcccctggatcttgcactgtgggccctgtggctactctgatctggctgctctggaggaggagggcttgtttgggtgtttgtttgaatgtgggaccaagcaagagtgtgagcagattgccttccgcctgtttacacaccgggagatcctgagtcacctgcagggggactgcaccagccctggtaggaacccaagccaattcaaaagcaat

SEQ ID NO: 35 - DNA, 1488 bp, Homo sapiens
atgatgagctctgcagccttcccaaggtggctgagcatgggggtccctcgtaccccttcacggacagtgctcttcgagcgggagaggacgggcctgacctaccgcgtgccctcgctgctccccgtgccccccgggcccaccctgctggcctttgtggagcagcggctcagccctgacgactcccacgcccaccgcctggtgctgaggaggggcacgctggccgggggctccgtgcggtggggtgccctgcacgtgctggggacagcagccctggcggagcaccggtccatgaacccctgccctgtgcacgatgctggcacgggcaccgtcttcctcttcttcatcgcggtgctgggccacacgcctgaggccgtgcagatcgccacgggaaggaacgccgcgcgcctctgctgtgtggccagccgtgacgccggcctctcgtggggcagcgcccgggacctcaccgaggaggccatcggtggtgccgtgcaggactgggccacattcgctgtgggtcccggccacggtgtgcagctgccctcaggccgcctgctggtacccgcctacacctaccgcgtggaccgccgagagtgttttggcaagatctgccggaccagccctcactccttcgccttctacagcgatgaccacggccgcacctggcgctgtggaggcctcgtgcccaacctgcgctcaggcgagtgccagctggcagcggtggacggtgggcaggccggcagcttcctctactgcaatgcccggagcccactgggcagccgtgtgcaggcgctcagcactgacgagggcacctccttcctgcccgcagagcgcgtggcttccctgcccgagactgcctggggctgccagggcagcatcgtgggcttcccagcccccgcccccaacaggccacgggatgacagttggtcagtgggccccgggagtcccctccagcctccactcctcggtcctggagtccacgaacccccagaggaggctgctgtagacccccgtggaggccaggtgcctggtgggcccttcagccgtctgcagcctcggggggatggccccaggcagcctggccccaggcctggggtcagtggggatgtggggtcctggaccctggcactccccatgccctttgctgccccgccccagagccccacgtggctgctgtactcccacccagtggggcgcagggctcggctacacatgggtatccgcctgagccagtccccgctggacccgcgcagctggacagagccctgggtgatctacgagggccccagcggctactccgacctggcgtccatcgggccggcccctgaggggggcctggtttttgcctgcctgtacgagagcggggccaggacctcctatgatgagatttccttttgtacattctccctgcgtgaggtcctggagaacgtgcccgccagccccaaaccgcccaaccttggggacaagcctcgggggtgctgctggccctcc

SEQ ID NO: 36 - protein, 781 aa, Vibrio cholerae
MRFKNVKKTALMLAMFGMATSSNAALFDYNATGDTEFDSPAKQGWMQDNTNNGSGVLTNADGMPAWLVQGIGGRAQWTYSLSTNQHAQASSFGWRMTTEMKVLSGGMITNYYANGTQRVLPIISLDSSGNLVVEFEGQTGRTVLATGTAATEYHKFELVFLPGSNPSASFYFDGKLIRDNIQPTASKQNMIVWGNGSSNTDGVAAYRDIKFEIQGDVIFRGPDRIPSIVASSVTPGVVTAFAEKRVGGGDPGALSNTNDIITRTSRDGGITWDTELNLTEQINVSDEFDFSDPRPIYDPSSNTVLVSYARWPTDAAQNGDRIKPWMPNGIFYSVYDVASGNWQAPIDVTDQVKERSFQIAGWGGSELYRRNTSLNSQQDWQSNAKIRIVDGAANQIQVADGSRKYVVTLSIDESGGLVANLNGVSAPIILQSEHAKVHSFHDYELQYSALNHTTTLFVDGQQITTWAGEVSQENNIQFGNADAQIDGRLHVQKIVLTQQGHNLVEFDAFYLAQQTPEVEKDLEKLGWTKIKTGNTMSLYGNASVNPGPGHGITLTRQQNISGSQNGRLIYPAIVLDRFFLNVMSIYSDDGGSNWQTGSTLPIPFRWKSSSILETLEPSEADMVELQNGDLLLTARLDFNQIVNGVNYSPRQQFLSKDGGITWSLLEANNANVFSNISTGTVDASITRFEQSDGSHFLLFTNPQGNPAGTNGRQNLGLWFSFDEGVTWKGPIQLVNGASAYSDIYQLDSENAIVIVETDNSNMRILRMPITLLKQKLTLSQN

SEQ ID NO: 37 - DNA, 2424 bp, Vibrio cholerae
ttgtcaatcaagatgacttcacaacgaagaagagcatcgattcacaaggaaacagattctaatataaagggagtagatatgcgtttcaaaaacgtaaagaaaaccgctttaatgcttgcaatgttcggtatggcgacaagctcaaacgccgcactttttgactataacgcaacgggtgacactgagtttgacagtccagccaaacagggatggatgcaagacaacacgaataatggcagcggcgttttaaccaatgcagatggaatgcccgcttggttggtgcaaggtattggagggagagctcaatggacatattctctctctactaatcaacatgcccaagcatcaagtttcggttggcgaatgacgacagaaatgaaagtgctcagtggtggaatgatcacaaactactacgccaacggcactcagcgtgtcttacccatcatttcattagatagcagtggtaacttagttgttgagtttgaagggcaaactggacgcaccgttttggcaaccggcacagcagcaacggaatatcataaatttgaattggtattccttcctggaagtaacccatccgctagcttttacttcgatggcaaactcattcgtgacaacatccagccgactgcatcaaaacaaaatatgatcgtatgggggaatggctcatcaaatacggatggtgtcgccgcttatcgtgatattaagtttgaaattcaaggcgacgtcatcttcagaggcccagaccgtataccgtccattgtagcaagtagcgtaacaccaggggtggtaaccgcatttgcagagaaacgtgtggggggaggagatcccggtgctctgagtaataccaatgacataatcactcgtacctcacgagatggcggtataacttgggataccgagctcaacctcactgagcaaatcaatgtcagtgatgagtttgatttctccgatcctcggcctatctatgatccttcctccaatacggttcttgtctcttatgctcgatggccgaccgatgccgctcaaaacggagatcgaataaaaccatggatgccaaacggtattttttacagcgtctatgatgttgcatcagggaactggcaagcgcctatcgatgttaccgatcaggtgaaagaacgcagtttccaaatcgctggttggggtggttcagagctgtatcgccgaaataccagcctaaatagccagcaagactggcaatcaaacgctaagatccgaattgttgatggtgcagcgaaccagatacaagttgccgatggtagccgaaaatatgttgtcacactgagtattgatgaatcaggtggtctagtcgctaatctaaacggtgttagtgctccgattatcctgcaatctgaacacgcaaaggtacactctttccatgactacgaacttcaatattcggcgttaaaccacaccacaacgttattcgtggatggtcagcaaatcacaacttgggctggcgaagtatcgcaggagaacaacattcagtttggtaatgcggatgcccaaattgacggcagactgcatgtgcaaaaaattgttctcacacagcaaggccataacctcgtggagtttgatgctttctatttagcacagcaaacccctgaagtagagaaagaccttgaaaagcttggttggacaaaaattaaaacgggcaacaccatgagtttgtatggaaatgccagtgtcaacccaggaccgggtcatggcatcacccttactcgacaacaaaatatcagtggcagccaaaacggccgcttgatctacccagcgattgtgcttgatcgtttcttcttgaacgtcatgtctatttacagtgatgatggcggttcaaactggcaaaccggttcaacactccctatcccctttcgctggaagagttcgagtatcctagaaactctcgaacctagtgaagctgatatggttgaactccaaaacggtgatctactccttactgcacgccttgattttaaccaaatcgttaatggtgtgaactatagcccacgccagcaatttttgagtaaagatggtggaatcacgtggagcctacttgaggctaacaacgctaacgtctttagcaatatcagtactggtaccgttgatgcttctattactcggttcgagcaaagtgacggtagccatttcttactctttactaacccacaaggaaaccctgcggggacaaatggcaggcaaaatctaggcttatggtttagcttcgatgaaggggtgacatggaaaggaccaattcaacttgttaatggtgcatcggcatattctgatatttatcaattggattcggaaaatgcgattgtcattgttgaaacggataattcaaatatgcgaattcttcgtatgcctatcacattgctaaaacagaagctgaccttatcgcaaaactaa

SEQ ID NO: 38 - protein, 409 aa, Mus musculus
MVGADPTRPRGPLSYWAGRRGQGLAAIFLLLVSAAESEARAEDDFSLVQPLVTMEQLLWVSGKQIGSVDTFRIPLITATPRGTLLAFAEARKKSASDEGAKFIAMRRSTDQGSTWSSTAFIVDDGEASDGLNLGAVVNDVDTGIVFLIYTLCAHKVNCQVASTMLVWSKDDGISWSPPRNLSVDIGTEMFAPGPGSGIQKQREPGKGRLIVCGHGTLERDGVFCLLSDDHGASWHYGTGVSGIPFGQPKHDHDFNPDECQPYELPDGSVIINARNQNNYHCRCRIVLRSYDACDTLRPRDVTFDPELVDPVVAAGALATSSGIVFFSNPAHPEFRVNLTLRWSFSNGTSWLKERVQVWPGPSGYSSLTALENSTDGKKQPPQLFVLYEKGLNRYTESISMVKISVYGTL

SEQ ID NO: 39 - protein, 393 aa, Mus musculus
MTVQPSPWFSDLRPMATCPVLQKETLFRTGVHAYRIPALLYLKKQKTLLAFAEKRASKTDEHAELIVLRRGSYNEATNRVKWQPEEVVTQAQLEGHRSMNPCPLYDKQTKTLFLFFIAVPGRVSEHHQLHTKVNVTRLCCVSSTDHGRTWSPIQDLTETTIGSTHQEWATFAVGPGHCLQLRNPAGSLLVPAYAYRKLHPAQKPTPFAFCFISLDHGHTWKLGNFVAENSLECQVAEVGTGAQRMVYLNARSFLGARVQAQSPNDGLDFQDNRVVSKLVEPPHGCHGSVVAFHNPISKPHALDTWLLYTHPTDSRNRTNLGVYLNQMPLDPTAWSEPTLLAMGICAYSDLQNMGQGPDGSPQFGCLYESGNYEEIIFLIFTLKQAFPTVFDAQ

SEQ ID NO: 40 - protein, 418 aa, Mus musculus
MEEVPPYSLSSTLFQQEEQSGVTYRIPALLYLPPTHTFLAFAEKRTSVRDEDAACLVLRRGLMKGRSVQWGPQRLLMEATLPGHRTMNPCPVWEKNTGRVYLFFICVRGHVTERCQIVWGKNAARLCFLCSEDAGCSWGEVKDLTEEVIGSEVKRWATFAVGPGHGIQLHSGRLIIPAYAYYVSRWFLCFACSVKPHSLMIYSDDFGVTWHHGKFIEPQVTGECQVAEVAGTAGNPVLYCSARTPSRFRAEAFSTDSGGCFQKPTLNPQLHEPRTGCQGSVVSFRPLKMPNTYQDSIGKGAPATQKCPLLDSPLEVEKGAETPSATWLLYSHPTSKRKRINLGIYYNRNPLEVNCWSRPWILNRGPSGYSDLAVVEEQDLVACLFECGEKNEYERIDFCLFSDHEVLSCEDCTSPSSD

SEQ ID NO: 41 - protein, 501 aa, Mus musculus
METAGAPFCFHVDSLVPCSYWKVMGPTRVPRRTVLFQRERTGLTYRVPALLCVPPRPTLLAFAEQRLSPDDSHAHRLVLRRGTLTRGSVRWGTLSVLETAVLEEHRSMNPCPVLDEHSGTIFLFFIAVLGHTPEAVQIATGKNAARLCCVTSCDAGLTWGSVRDLTEEAIGAALQDWATFAVGPGHGVQLRSGRLLVPAYTYHVDRRECFGKICWTSPHSLAFYSDDHGISWHCGGLVPNLRSGECQLAAVDGDFLYCNARSPLGNRVQALSADEGTSFLPGELVPTLAETARGCQGSIVGFLAPPSIEPQDDRWTGSPRNTPHSPCFNLRVQESSGEGARGLLERWMPRLPLCYPQSRSPENHGLEPGSDGDKTSWTPECPMSSDSMLQSPTWLLYSHPAGRRARLHMGIYLSRSPLDPHSWTEPWVIYEGPSGYSDLAFLGPMPGASLVFACLFESGTRTSYEDISFCLFSLADVLENVPTGLEMLSLRDKAQGHCWPS

SEQ ID NO: 42 - DNA, 3850 bp, Mus musculus
gggtcacatgctgatggactaattggagtcgcggcagcgcgggctgcggcccccaaggggaggggtcggagtgacgtgcgcgcttttaaagggccgaggtcagctgacggcttgccaccggtgaccagttcctggacagggatcgccgggagctatggtgggggcagacccgaccagaccccggggaccgctgagctattgggcgggccgtcggggtcaggggctcgcagcgatcttcctgctcctggtgtccgcggcggaatccgaggccagggcagaggatgacttcagcctggtgcagccgctggtgaccatggagcagctgctgtgggtgagcgggaagcagatcggctctgtagacactttccgcatcccgctcatcacagccacccctcggggcacgctcctggccttcgctgaggccaggaaaaaatctgcatccgatgagggggccaagttcatcgccatgaggaggtccacggaccagggtagcacgtggtcctctacagccttcatcgtagacgatggggaggcctccgatggcctgaacctgggcgctgtggtgaacgatgtagacacagggatagtgttccttatctataccctctgtgctcacaaggtcaactgccaggtggcctctaccatgttggtttggagtaaggacgacggcatttcctggagcccaccccggaatctctctgtggatattggcacagagatgtttgcccctggacctggctcaggcattcagaaacagcgggagcctgggaagggccggctcattgtgtgtggacacgggacgctggagcgagatggggtcttctgtctcctcagtgatgaccacggtgcctcctggcactacggcactggagtgagcggcattccctttggccagcccaaacacgatcacgatttcaaccccgacgagtgccagccctacgagcttccagatggctcggtcatcatcaacgcccggaaccagaataactaccattgccgctgcaggatcgtcctccgcagctatgacgcctgtgacaccctcaggccccgggatgtgaccttcgaccctgagctcgtggaccctgtggtagctgcaggagcactagccaccagctccggcattgtcttcttctccaatccagcccaccctgagttccgagtgaacctgaccctgcgctggagtttcagcaatggtacatcctggcagaaggagagggtccaggtgtggccgggacccagcggctactcgtccctgacagccctggaaaacagcacggatggaaagaagcagcccccgcagctgttcgttctgtacgagaaaggcctgaaccggtacaccgagagcatctccatggtcaaaatcagcgtctacggcacgctctgagccccgtgcccaaaggacaccaagtcctggtcgctgacttcacagctctctggaccatctgcagagggtgcctgaaacacagctcttcctctgaactctgaccttttgcaacttctcatcaacagggaagtctcttcgttatgacttaacacccagcttcctctcggggcaggaagtccctccgtcaccaagagcacttttttccagtatgctggggatggcccctgtccattctcttccaggacaacggagctgtgcctttctgggacaggatgggggaggggctccccctggagagatgaacagatacgaactcagggaactgagaaggcccggtgtcctagggtacaaaggcaggtactagatgtgattgctgaaagtccccagggcagagtgtcctttcagagcaaggataagcacacctacgtgtgcacctttgattatttatgaatcgaaatatttgtaacttaaaatttttgatgcagaaaaagcgtttgtggagtctgtggttctgtctgctcacgccttcccaattgcctcctggagagacaggaaggcagctggaagaggagccgatgtacttactgggaagcagaaacccctagattccatcctggctgctgctgtttgcaagtgtcaaagatgggggggcgtgtttatattttatatttctaagatggggtggcataggaaatagggaacagatgtgtaaaaccagatgggaaggacagtctgtgagaaaggagcaagcagttgctgcaggtgtgggagagcaaagcccttctccacgtggaaagagcccagatggacgctaagcatgttgggcacctgtaaccccgcactcgctggactgacggtgtagctcagtggtggagctagtacttggaacgcctaagactctgggttcagtccttgggggggggggtatgtgtttattgagaggaaggtgtacgtactgtaggtcagaggacagcttactggagttgtctctctccttcacgctgtgagtcctgtggaatgacctcaggtgtcagagttgggggcaggtgcctttgccagctgagccatcttgctgtctctgctttaatttaaaaaaaaaaaaaaaaaagaatattaaggtctgagggattcgggctgcgttcatttcaattagagggtcatatttcttttgacatttcttctctaagaaatgttaagatcatttgttctgtgtgatagaggtatagctccattgtatgtcagcagtgagggatcctgtgcattttatccagagtttgtacggtgttctaggggctgctagtgcagcccagtgctaaacacttcagcatgcacaaggcctcaatcagtgcatgcatgtgcacacacacacagacacacacgtacacactgacacaggtacacaaatacacactggcccacatgtacacatcgactcacaggtacacagacccactttgacacacatatacacagacacaaacgcactggcacacacatatacacaggcacacatggatagatggacacacgtgtacacatacacacacacacagaaatacaaatgttcaggttttctaaaaaaaaaaaaattagagacgtgttgacttcatttttagcaaaaatcctgtcatgtatcttaaagtggattgaacccactatgtagcccaggctggcctccaaatgggcatccttctgcctcagtctcccgagggctaggataacaggagtatgccatcacacctggctaatagaaattttcaaaattgtttgtttgaaggtgactcttactatattgcctaactgatctccagttcgtgaaatcctcctgcctcagaaccaggactgtcaatataacccaccaagacaggccaacattcacaattgattgttagtttgtggtctgaatcaaggtcttatactgtagcccaggctagcccggaatacacgatatctccagtgcttcagatcctcagttctaactaagcatggccacatccatgtttaactgcaaatttgatgttaccatggtttggtttggtttggtttggtttggtttggtttggtttggttttttggccattttttttttctcatgctgaggccttgtgctctcaagttggggagacagcatggagggtagctgcaactgtaaccccagttccaggggacctgacaccctctggcctccacaagtattaggcacatctgtggtgcacagacatacaatcaggcaaaatattcatacacataaaataaaataatttaaaacaaaagcaaaaatcaggacctaagaaaaaaatctattcctgattcttttatgttttgtttgtattttatcaagacagggttgtttctctgtatagccctggctgtcttggaattcactctgtagaccaggctggcctcaaactcagaaatcctcctgcctttgccttccaagtgctggaattaaaggcatgcgccacc

SEQ ID NO: 43 - DNA, 1722 bp, Mus musculus
gacatgacccaaacggcccctggctgcaaggtaatatcggaagttgactaagaatggacgccccaccactgactgacccgccccctgagtctgagattggacttgtctctggatacagtcatactttgaggtactacaagttagaaactgttaggttactcagttcagtccatgacagtccaaccttctccatggttttccgatctcaggcccatggcgacctgccctgtcctgcagaaggagacactgttccgcacaggcgtccatgcttacagaatccctgctctgctctacctgaagaagcagaagaccctgctggcctttgcggaaaagcgagccagcaagacggatgagcacgcagagttgattgtcctgagaagaggaagctacaacgaagccaccaaccgtgtcaagtggcagcctgaggaagtggtgacccaagcccagctggaaggccaccgctccatgaatccatgtcccttgtatgacaagcaaacaaagaccctcttccttttcttcatcgctgtccctgggcgtgtatcagaacatcatcagctccacactaaggttaatgtcacacggctgtgctgtgtcagcagcactgaccatgggaggacctggagccccatccaggacctcacagagaccaccattggcagcactcatcaggaatgggccacatttgctgtgggtcctgggcattgtctgcagctgcggaacccagctgggagcctgctggtacctgcttatgcctaccggaaactgcaccctgctcagaagcctaccccctttgccttctgcttcatcagccttgaccatgggcacacatggaaactaggcaactttgtggctgaaaactcactggagtgccaggtggctgaggttggcactggagctcagaggatggtatatctcaatgctaggagcttcctgggagccagggtccaggcacaaagtcctaatgatggtctggatttccaggacaaccgggtagtgagtaagcttgtagagcccccccacgggtgtcatggaagtgtggttgccttccacaaccccatctctaagccacatgccttagacacatggcttctttatacacaccctacagactccaggaatagaaccaacctgggtgtgtacctaaaccagatgccactagatcccacagcctggtcagagcccaccctgctggccatgggcatctgtgcctactcagacttacagaacatggggcaaggccctgatggctccccacagtttgggtgtctgtatgaatcaggtaactatgaagagatcattttcctcatattcaccctgaagcaagctttccccactgtatttgatgcccagtgatctcagtgcacgtggcccaaagggcttccttgtgcttcaaaacacccatctctctttgcttccagcatcctctggactcttgagtccagctcttgggtaacttcctcaggaggatgcagagaatttggtctcttgactctctgcaggccttattgtttcagcctctggttctcttttcagcccagaaatcaaaggagcctggctttcctcagcctgttggcagggcaggtggggacagtatatatagaggctgccattctgcatgtcggttgtcactatgctagtttaacctgcctgtttccccatgcctagtgtttgaatgagtattaataaaatatccaacccagcccatttcttcctggaaaaaaa

SEQ ID NO: 44 - DNA, 3340 bp, Mus musculus
actgcgcggtgaaggggcgtggcctggccggggaggttgacacccagacgctgctctcagtcctctggcgcctgctccccagcgcattccttctgctcctgggatatttgtctcattactgccagttcttgcgcagcggtcactgggttcgtttcagcgtctgtggtttctgtcgctgttatccagtctccatcgccccagctcagcttcaggccttcttccgagactccacgggagagcccagagagcctccggagccgaagccatggaggaagtcccaccctactccctcagcagcaccctgttccagcaggaagaacagagtggggtgacctaccggatcccagccctgctgtaccttcctcccacccacaccttcctggcctttgcagagaagcggacctcagtcagagatgaggatgctgcctgcctggtgctcagacgagggctgatgaaggggcgctctgtacagtggggcccccaacggctactgatggaggccacattacctgggcatcgcaccatgaacccctgccctgtgtgggagaaaaatactggccgtgtgtacctgtttttcatctgtgtgcggggccatgttactgagaggtgccagattgtgtggggcaaaaatgccgcccgtctctgcttcctttgcagtgaagatgccggctgctcttggggtgaagtgaaagacttgaccgaggaggtcattggctcagaggtgaagcgctgggccacatttgctgtgggcccaggtcatggcatccagctacactcgggaaggctgatcatccccgcctatgcctactatgtctcacgttggtttctctgctttgcgtgttcagtcaagccccattccctgatgatctacagtgatgactttggagtcacatggcaccatggcaagttcattgagccccaggtgacaggggagtgccaagtggccgaagtggctgggacggctggtaaccctgtgctcactgcagtgcccgaacaccaagccgatttcgagcagaggcttttagtactgatagtggtggctgctttcagaagccaaccctgaacccacaactccatgagcctcgaaccggctgccaaggtagtgtagtgagcttccggcctttgaagatgccaaatacctatcaagactcaattggcaaaggtgctcccgctactcagaagtgccctctgctggacagtcctctggaggtggagaaaggagctgaaacaccatcagcaacatggctcttgtactcacatccaactagcaagaggaagaggattaacctaggcatctactacaaccggaaccccttggaggtgaactgctggtcccgcccgtggatcttgaaccgtgggcccagtggctactctgatctggctgttgtggaagaacaggacttggtggcgtgtttgtttgagtgtggggagaagaatgagtatgagcggattgacttctgtctgttttcagaccatgaggtcctgagctgtgaagactgtaccagccctagtagcgactaaagccaaatcaagacggatgagtgaggcccagcttcccacagaaaggaatggcagctacagccagggtaacagaggtctctgatgtctagagaaaactctaaaaactaataatctgctccttgaattttttcacttttcccttcaatgagcatggtgaaaattgtgccatatcttacataacgaggctcttgaactgggagtttgaatctcttctcttcccattaaaaggagaggccatgtgctcgcttcgcgttcgacaaagcctggattctgatcttgagtggaagccacaggcttgtcttttccaatggttcactgctcacctgagtattaggtgatgtgtaggtgccttggccagaagaaagatctgtgttgttgtatttttttaaatttatttatttactatatgtaagtacactgcagctgtcttcagacacaccagaagagggcgtcagatctcattagagatggttgtgagccaccatgtggttgctgggatttgaactcaggaccttcagaagagcagtcagtgctcttaactactgagccatctctcaagccccgcattgctgtatttttaataagaaaaatgcccttatccttccaataatgcctggagctgtacaaattctctgtcttagaagacttgagaaagcagaactgtaaggtcagatgctttctccagccttgatgctgtgttccaccttcccttcctcatccagaaaacagttactagggagaaaatgagaaacccatgccagctgcccttgatgatggttgataacggtgcttattgcttttgatgtcattacctctgttagagatgaatcagagtcagaggtccttagctgcatccacccatttccagggggacattctaacactgctgaacagtcagctaaaatgagagctgtgtgtcctagcctgattccaggttagtcatgatgcttcctggagctgggcttttatctaatcccaggagccatctaggggaggctcagagctagcaggtgatcttcctgagatggtttcaccgtgacaggtgaaccatgagcccttccaagcaaggccaaaggacaacattataggaaagatttctagtattaatatgccttttctctgtgtgtgtactgtcttgtagtgatgctatatagacaaatagatgatttcttattttttgtttgtttgtttgtttttttgtttttctgtagccctagctgtcctggaactcactttgtaaaccaggctggcctcgatctcagaaatccgcctgcctctgcctcccgagtgctgggattaaaggtgtgcaccaccacaccttaatgatgatcctataagtattcctaaaattatactagtaattattaactcctttataataggactgctattaaagccctcgctgatatgaaaactacagtgagaactctgccagtcttcacatgtcataattacttctgagatagaaagcaggcatttacaacttagaacacatttcttagagctgtaaaacaattaactagaggtcataaaagggaatgaaagatttattgtaggtgctaggacagaacataaaatattgactgggcttatctatatgaaacttcattgttaacttttacacaagaattatggtttttaactttcagtgaacctgcggagctagtgacagaagagaaatgtctagttagataactactcttaatggaaattcacataaacatctgttgccatcttctttttgaatttatgtttaaacttgtgaatgtttgaattagacactacgcgagcacatagaaaataaagaactaagcgtgaa

SEQ ID NO: 45 - DNA, 4608 bp, Mus musculus
ggacagtgtgcatcacggagcttgtggcccagactgtgcctggcagacccagaggacctaaggcttggctctagtggtggtcagcacagccctcggtggtctgcggagcctgatattgctttacgtaagggctgttctgctgtgcatctcctgtgtctgaagctattcgccatggagactgctggagctcccttctgcttccatgtggactccctggtaccttgctcctactggaaggttatggggcccacgcgtgttcccaggagaacggtgctcttccagagggaaaggacgggcctgacctaccgtgtgcctgcgttactctgtgtgcctcccaggcctactctgctggccttcgcggaacagcgacttagccctgatgactcccatgcccaccgcctggtgctacggaggggcacgctgaccaggggctcagtgcggtggggcactctgagtgtactggagactgcagtactggaggagcacaggtctatgaacccttgcccggtgctggatgagcactctggtaccatcttcctcttcttcattgccgtgctgggccacacaccggaggccgtgcaaatcgccactggcaagaacgctgctcgcctctgctgtgtgaccagctgtgacgctggcctcacctggggcagtgttcgagatctcactgaggaagccattggtgctgcattgcaggactgggccacctttgctgtgggtccgggccatggagttcagctgcgctcgggtcgcctgcttgttcctgcttacacctatcatgtggaccgacgggaatgttttggcaagatctgctggaccagtccccactccttggcattctacagtgatgatcatgggatctcctggcattgtggaggccttgtgcccaacctacgctctggagagtgccaactggctgcggtagatggagactttctctactgtaatgctcgaagccctctgggtaaccgtgtgcaggcactgagtgctgatgaaggcacgtccttcctaccaggggagctggtgcctacattggcagagacggctcgtggttgccagggtagcattgtgggcttcctagctccaccctcaatcgagcctcaggatgaccggtggacagggagtcctaggaacaccccacattccccatgcttcaatctcagagtacaggagtcttcgggggaaggtgccagaggtcttcttgaacgttggatgcccaggttgcctctctgctacccacagtcccggagcccagagaatcatggcctagagcctgggtcagatggagataagacatcctggactccggaatgtcctatgtcctctgattccatgcttcagagccccacatggctactatattcccacccagcagggcgtagagctcggctccacatgggaatctacctgagccgatcccccttggatccccacagctggacagagccctgggtgatctatgagggccccagtggctactctgaccttgcctttcttgggcctatgcctggggcatccctggtttttgcctgtctgtttgagagcgggaccaggacttcctatgaagacatttctttttgcttgttctcactggcggatgtcctggagaatgtgcccactggcttagagatgctaagtctcagggataaggctcaggggcattgctggccctcttgatggcctcaccctctcgtagccgcctggagaggaagggtagactatatagaggaggttaggggtaggtcagcatgatgctaggatggagagagctctgtcccctcgtggatggtggtggtgactcacccggggggccagctgctttctgagtgcaaatgagaaaaataaagagctgcgctgtgacttttctttccacatcaaagcttgggtgtcagtgctttagcttgatgctctgatcaccatgcaaatcttccaccggcgccttgctcagctttcatatcccaagggtgcctgggaggaaggcaacagggacagtggacatcactgcaccactttccacgaccctgtgtgccaacctcagccactttgaaacatgctgatgactgaggtctgttcactttcttaatttcaagcaggagaagcaggttggggagccagcctccccagctagaggggacagaacttgacttgagcaggggggtacctcctaggacctgctccatgtgcctacttctttacccttctctagagagggctcttgtcctgtcagagctgttttctcccttctcttgttttttctttttcaagactgtttctctgtgttagccctggctgtcctggatctcactctgtagatcaggctgaccttgagttcaaagctccatctgcctctacttctcacattactgtgattaaaggcatatactaccactgcctggtgcccttttgtatttcttattaaagtcctaatgtctgattataaaaacagtctgtgtgggctggagtgatggcttactcagtaaagcacttgccatggaatctgggcaatctgagtttcatttttagcatcctgtaaaaatcccaatttgatggtgtacttgtaatgtcagcatggagaggcagagataggtaagttccccaagactctttgaaccgacagcttggcctcactggcacattccaggtctcagtgagagaccctgcctcaaaatacaaagaaagagctgctgaagagtgggtcagagttgacctctgatctccggaagtatatgatacacacccgtgcatgcactcttccttacaaaataaaaagcaaaacaaaaccccaacaggtatatggccattttagaaaaattagaagatttagaaagctatacataaaaaaaaatgacctaaagaaaaatctttactgttctgggcactatccctatcaaaccactgtgttctttggccaagccttggggtggacactgttttgaggtgggtcctgttatctccactaggtagtggagttttgtgtcagactaactgggtcttaaagctgtctttaaggccatcaggagctactgacttgcctgcctcagcagagcatatcctgaaggtcggggttaagtctccttcccgagcgagttgccttccagtgggcccctggactcctaggtcctcagcgctcatcagctgccaaggactctgagggaatgtcctctgactgtggccccgaaaggtaggggagggggatgtgcttaggcttaggacagggtcctgtttcagtctgccttcactgttagtagcactgtgccacatggcacagactgggcgagctttaaaggaaggaggttgatattggttcccacttctggggatcatggttgagcagccttgtctgatgatggttgtcttgatggtagatcgtgaggtagttgatgaaggtatgacatggtgagaaactctgtgtgtgtgtgttattttctctgtgttctacctatacatctatctatgtatatatgtatctatctatctacctggaggctggagagatagcttagtggttaagaacatttgttgttcttgcatagtcctggatttaaattttcagcacccacatggcagctcacaacaacccataaatccagtttcagaggatccaacctctgatataccatgtcagccagagcagacacggctgaaggtggtttgatccccgtatggagaggtgacaattgggaagagagaaagatcaacttaaccatgcaaggaacaggaagttaaatactgaacagggaaggtaaaggcaggaagtagatgtagagggcaaatcaatgaaacccaaacatacccaaattacgctaaacacacactgacatgccaattaaaaggacaaattggctccactggcaaaaccaaaacagacactgaagatccaaacagtcacatgccaactaccgcggagggagacagacacagagaagaccgtgacagacacttggacactcttgagagtggatgtgcaggaagagagctctgccagtggagaagaaagcactcagaagaaagtgacagcagctgtaaatttgtattctgctaatgttatgttccaaagttgaaagcaaaattgtaccaattcataagaacaaacaggctgactctcagttgtgactgaacgtctctcagtaactgacggggcgagcaggccaaaggagagtcggctcagaagggtgcatagccacgccaaatcaaataagcaagtacaaccggcaggctctatttctagcacaaaggggtctgtgcctcattctgtgcttgggtcagagcttgggtctctcatttggatgtaagtggtgtagtggagaagcaggaaataatccggagcgcatattttgattttaacataagtgctgatttgggagggagttttgtcaaattgtgtttttacaatgtttttttttttttaaatgatgcttttttgtaaagtgtacaaatgtgatataagattggttctgctacattcagtttctataaaagtggttctaaaatattgtactgtcaatcatctcatgattattctactgtacacattactgactttgtatgtaataattaatattagaagaaaatataatttatttgaatataaaaaaaaaaaaaaaaaaa

SEQ ID NO: 46 - protein, 380 aa, Artificial Sequence
  Description of Artificial Sequence: Synthetic polypeptide
  MOD_RES (1)..(1): Any amino acid
  MOD_RES (6)..(6): Any amino acid
  MOD_RES (9)..(9): Any amino acid
  MOD_RES (62)..(62): Any amino acid
  MOD_RES (93)..(93): Any amino acid
  MOD_RES (187)..(187): Any amino acid
  MOD_RES (270)..(270): Any amino acid
  MOD_RES (301)..(302): Any amino acid
  MOD_RES (332)..(332): Any amino acid
  MOD_RES (363)..(363): Any amino acid
  MOD_RES (365)..(365): Any amino acid
XASLPXLQXESVFQSGAHAYRIPALLYLPGQQSLLAFAEQRASKKDEHAELIVLRRGDYDAXTHQVQWQAQEVVAQARLDGHRSMNPCPLYDXQTGTLFLFFIAIPGQVTEQQQLQTRANVTRLCQVTSTDHGRTWSSPRDLTDAAIGPAYREWSTFAVGPGHCLQLHDRARSLVVPAYAYRKLHPXQRPIPSAFCFLSHDHGRTWARGHFVAQDTLECQVAEVETGEQRVVTLNARSHLRARVQAQSTNDGLDFQESQLVKKLVEPPPXGCQGSVISFPSPRSGPGSPAQWLLYTHPTHXXQRADLGAYLNPRPPAPEAWSEPVLLAKGSXAYSDLQSMGTGPDGSPLFGCLYEANDYEEIXFXMFTLKQAFPAEYLPQ

SEQ ID NO: 47 - protein, 380 aa, Artificial Sequence
  Description of Artificial Sequence: Synthetic polypeptide
  MOD_RES (1)..(2): Any amino acid
  MOD_RES (4)..(6): Any amino acid
  MOD_RES (9)..(9): Any amino acid
  MOD_RES (44)..(45): Any amino acid
  MOD_RES (54)..(54): Any amino acid
  MOD_RES (62)..(62): Any amino acid
  MOD_RES (69)..(69): Any amino acid
  MOD_RES (78)..(78): Any amino acid
  MOD_RES (93)..(93): Any amino acid
  MOD_RES (107)..(108): Any amino acid
  MOD_RES (112)..(112): Any amino acid
  MOD_RES (125)..(126): Any amino acid
  MOD_RES (150)..(150): Any amino acid
  MOD_RES (164)..(164): Any amino acid
  MOD_RES (171)..(171): Any amino acid
  MOD_RES (187)..(187): Any amino acid
  MOD_RES (196)..(196): Any amino acid
  MOD_RES (217)..(217): Any amino acid
  MOD_RES (249)..(249): Any amino acid
  MOD_RES (251)..(251): Any amino acid
  MOD_RES (257)..(257): Any amino acid
  MOD_RES (270)..(270): Any amino acid
  MOD_RES (272)..(272): Any amino acid
  MOD_RES (292)..(292): Any amino acid
  MOD_RES (301)..(302): Any amino acid
  MOD_RES (325)..(325): Any amino acid
  MOD_RES (332)..(332): Any amino acid
  MOD_RES (352)..(352): Any amino acid
  MOD_RES (363)..(363): Any amino acid
  MOD_RES (365)..(365): Any amino acid
XXSXXXLQXESVFQSGAHAYRIPALLYLPGQQSLLAFAEQRASXXDEHAELIVXRRGDYDAXTHQVQWXAQEVVAQAXLDGHRSMNPCPLYDXQTGTLFLFFIAIPXXVTEXQQLQTRANVTRLXXVTSTDHGRTWSSPRDLTDAAIGPXYREWSTFAVGPGHXLQLHDRXRSLVVPAYAYRKLHPXQRPIPSAFXFLSHDHGRTWARGHFVAQDTXECQVAEVETGEQRVVTLNARSHLRARVQAQSXNXGLDFQXSQLVKKLVEPPPXGXQGSVISFPSPRSGPGSPAQXLLYTHPTHXXQRADLGAYLNPRPPAPEAWSEPXLLAKGSXAYSDLQSMGTGPDGSPLFGXLYEANDYEEIXFXMFTLKQAFPAEYLPQ

SEQ ID NO: 48 - protein, 380 aa, Artificial Sequence
  Description of Artificial Sequence: Synthetic polypeptide
DASLPYLQKESVFQSGAHAYRIPALLYLPGQQSLLAFAEQRASKKDEHAELIVLRRGDYDAGTHQVQWQAQEVVAQARLDGHRSMNPCPLYDEQTGTLFLFFIAIPGQVTEQQQLQTRANVTRLCQVTSTDHGRTWSSPRDLTDAAIGPAYREWSTFAVGPGHCLQLHDRARSLVVPAYAYRKLHPKQRPIPSAFCFLSHDHGRTWARGHFVAQDTLECQVAEVETGEQRVVTLNARSHLRARVQAQSTNDGLDFQESQLVKKLVEPPPQGCQGSVISFPSPRSGPGSPAQWLLYTHPTHSWQRADLGAYLNPRPPAPEAWSEPVLLAKGSAAYSDLQSMGTGPDGSPLFGCLYEANDYEEIVFLMFTLKQAFPAEYLPQ

SEQ ID NO: 49 - protein, 380 aa, Artificial Sequence
  Description of Artificial Sequence: Synthetic polypeptide
DASLPYLQDESVFQSGAHAYRIPALLYLPGQQSLLAFAEQRASKKDEHAELIVLRRGDYDAPTHQVQWQAQEVVAQARLDGHRSMNPCPLYDEQTGTLFLFFIAIPGQVTEQQQLQTRANVTRLCQVTSTDHGRTWSSPRDLTDAAIGPAYREWSTFAVGPGHCLQLHDRARSLVVPAYAYRKLHPKQRPIPSAFCFLSHDHGRTWARGHFVAQDTLECQVAEVETGEQRVVTLNARSHLRARVQAQSTNDGLDFQESQLVKKLVEPPPQGCQGSVISFPSPRSGPGSPAQWLLYTHPTHSWQRADLGAYLNPRPPAPEAWSEPVLLAKGSAAYSDLQSMGTGPDGSPLFGCLYEANDYEEIRFIMFTLKQAFPAEYLPQ

SEQ ID NO: 50 - protein, 380 aa, Artificial Sequence
  Description of Artificial Sequence: Synthetic polypeptide
DASLPYLQKESVFQSGAHAYRIPALLYLPGQQSLLAFAEQRASKKDEHAELIVLRRGDYDANTHQVQWQAQEVVAQARLDGHRSMNPCPLYDAQTGTLFLFFIAIPGQVTEQQQLQTRANVTRLCQVTSTDHGRTWSSPRDLTDAAIGPAYREWSTFAVGPGHCLQLHDRARSLVVPAYAYRKLHPKQRPIPSAFCFLSHDHGRTWARGHFVAQDTLECQVAEVETGEQRVVTLNARSHLRARVQAQSTNDGLDFQESQLVKKLVEPPPQGCQGSVISFPSPRSGPGSPAQWLLYTHPTHSWQRADLGAYLNPRPPAPEAWSEPVLLAKGSAAYSDLQSMGTGPDGSPLFGCLYEANDYEEIVFLMFTLKQAFPAEYLPQ

SEQ ID NO: 51 - protein, 380 aa, Artificial Sequence
  Description of Artificial Sequence: Synthetic polypeptide
DASLPYLQKESVFQSGAHAYRIPALLYLPGQQSLLAFAEQRASKKDEHAELIVLRRGDYDAPTHQVQWQAQEVVAQARLDGHRSMNPCPLYDAQTGTLFLFFIAIPGQVTEQQQLQTRANVTRLCQVTSTDHGRTWSSPRDLTDAAIGPAYREWSTFAVGPGHCLQLHDRARSLVVPAYAYRKLHPKQRPIPSAFCFLSHDHGRTWARGHFVAQDTLECQVAEVETGEQRVVTLNARSHLRARVQAQSTNDGLDFQESQLVKKLVEPPPAGCQGSVISFPSPRSGPGSPAQWLLYTHPTHRKQRADLGAYLNPRPPAPEAWSEPVLLAKGSAAYSDLQSMGTGPDGSPLFGCLYEANDYEEIVFLMFTLKQAFPAEYLPQ

SEQ ID NO: 52 - protein, 380 aa, Artificial Sequence
  Description of Artificial Sequence: Synthetic polypeptide
DASLPYLQKESVFQSGAHAYRIPALLYLPGQQSLLAFAEQRASKKDEHAELIVLRRGDYDASTHQVQWQAQEVVAQARLDGHRSMNPCPLYDAQTGTLFLFFIAIPGQVTEQQQLQTRANVTRLCQVTSTDHGRTWSSPRDLTDAAIGPAYREWSTFAVGPGHCLQLHDRARSLVVPAYAYRKLHPKQRPIPSAFCFLSHDHGRTWARGHFVAQDTLECQVAEVETGEQRVVTLNARSHLRARVQAQSTNDGLDFQESQLVKKLVEPPPAGCQGSVISFPSPRSGPGSPAQWLLYTHPTHRKQRADLGAYLNPRPPAPEAWSEPVLLAKGSAAYSDLQSMGTGPDGSPLFGCLYEANDYEEIVFLMFTLKQAFPAEYLPQ

SEQ ID NO: 53 - protein, 380 aa, Artificial Sequence
  Description of Artificial Sequence: Synthetic polypeptide
DASLPYLQKESVFQSGAHAYRIPALLYLPGQQSLLAFAEQRASKKDEHAELIVLRRGDYDATTHQVQWQAQEVVAQARLDGHRSMNPCPLYDAQTGTLFLFFIAIPGQVTEQQQLQTRANVTRLCQVTSTDHGRTWSSPRDLTDAAIGPAYREWSTFAVGPGHCLQLHDRARSLVVPAYAYRKLHPKQRPIPSAFCFLSHDHGRTWARGHFVAQDTLECQVAEVETGEQRVVTLNARSHLRARVQAQSTNDGLDFQESQLVKKLVEPPPAGCQGSVISFPSPRSGPGSPAQWLLYTHPTHRKQRADLGAYLNPRPPAPEAWSEPVLLAKGSAAYSDLQSMGTGPDGSPLFGCLYEANDYEEIVFLMFTLKQAFPAEYLPQ

SEQ ID NO: 54 - protein, 380 aa, Artificial Sequence
  Description of Artificial Sequence: Synthetic polypeptide
DASLPYLQKESVFQSGAHAYRIPALLYLPGQQSLLAFAEQRASKKDEHAELIVLRRGDYDANTHQVQWQAQEVVAQARLDGHRSMNPCPLYDAQTGTLFLFFIAIPGQVTEQQQLQTRANVTRLCQVTSTDHGRTWSSPRDLTDAAIGPAYREWSTFAVGPGHCLQLHDRARSLVVPAYAYRKLHPKQRPIPSAFCFLSHDHGRTWARGHFVAQDTLECQVAEVETGEQRVVTLNARSHLRARVQAQSTNDGLDFQESQLVKKLVEPPPAGCQGSVISFPSPRSGPGSPAQWLLYTHPTHRKQRADLGAYLNPRPPAPEAWSEPVLLAKGSAAYSDLQSMGTGPDGSPLFGCLYEANDYEEIVFLMFTLKQAFPAEYLPQ

SEQ ID NO: 55 - protein, 379 aa, Artificial Sequence
  Description of Artificial Sequence: Synthetic polypeptide
ASLPYLQKESVFQSGAHAYRIPALLYLPGQQSLLAFAEQRASKKDEHAELIVLRRGDYDAPTHQVQWQAQEVVAQARLDGHRSMNPCPLYDAQTGTLFLFFIAIPGQVTEQQQLQTRANVTRLCQVTSTDHGRTWSSPRDLTDAAIGPAYREWSTFAVGPGHCLQLHDRARSLVVPAYAYRKLHPKQRPIPSAFCFLSHDHGRTWARGHFVAQDTLECQVAEVETGEQRVVTLNARSHLRARVQAQSTNDGLDFQESQLVKKLVEPPPQGCQGSVISFPSPRSGPGSPAQWLLYTHPTHSWQRADLGAYLNPRPPAPEAWSEPVLLAKGSCAYSDLQSMGTGPDGSPLFGCLYEANDYEEIVFLMFTLKQAFPAEYLPQ

SEQ ID NO: 56 - protein, 380 aa, Artificial Sequence
  Description of Artificial Sequence: Synthetic polypeptide
MASLPYLQKESVFQSGAHAYRIPALLYLPGQQSLLAFAEQRASKKDEHAELIVLRRGDYDAPTHQVQWQAQEVVAQARLDGHRSMNPCPLYDAQTGTLFLFFIAIPGQVTEQQQLQTRANVTRLCQVTSTDHGRTWSSPRDLTDAAIGPAYREWSTFAVGPGHCLQLHDRARSLVVPAYAYRKLHPKQRPIPSAFCFLSHDHGRTWARGHFVAQDTLECQVAEVETGEQRVVTLNARSHLRARVQAQSTNDGLDFQESQLVKKLVEPPPQGCQGSVISFPSPRSGPGSPAQWLLYTHPTHSWQRADLGAYLNPRPPAPEAWSEPVLLAKGSCAYSDLQSMGTGPDGSPLFGCLYEANDYEEIVFLMFTLKQAFPAEYLPQ

SEQ ID NO: 57 - protein, 379 aa, Artificial Sequence
  Description of Artificial Sequence: Synthetic polypeptide
ASLPYLQKESVFQSGAHAYRIPALLYLPGQQSLLAFAEQRASKKDEHAELIVLRRGDYDAPTHQVQWQAQEVVAQARLDGHRSMNPCPLYDAQTGTLFLFFIAIPGQVTEQQQLQTRANVTRLCQVTSTDHGRTWSSPRDLTDAAIGPAYREWSTFAVGPGHCLQLHDRARSLVVPAYAYRKLHPKQRPIPSAFCFLSHDHGRTWARGHFVAQDTLECQVAEVETGEQRVVTLNARSHLRARVQAQSTNDGLDFQESQLVKKLVEPPPQGCQGSVISFPSPRSGPGSPAQWLLYTHPTHSWQRADLGAYLNPRPPAPEAWSEPVLLAKGSAAYSDLQSMGTGPDGSPLFGCLYEANDYEEIVFLMFTLKQAFPAEYLPQ

SEQ ID NO: 58 - protein, 380 aa, Artificial Sequence
  Description of Artificial Sequence: Synthetic polypeptide
DASLPYLQKESVFQSGAHAYRIPALLYLPGQQSLLAFAEQRASKKDEHAELIVLRRGDYDAPTHQVQWQAQEVVAQARLDGHRSMNPCPLYDAQTGTLFLFFIAIPGQVTEQQQLQTRANVTRLCQVTSTDHGRTWSSPRDLTDAAIGPAYREWSTFAVGPGHCLQLHDRARSLVVPAYAYRKLHPKQRPIPSAFCFLSHDHGRTWARGHFVAQDTLECQVAEVETGEQRVVTLNARSHLRARVQAQSTNDGLDFQESQLVKKLVEPPPQGCQGSVISFPSPRSGPGSPAQWLLYTHPTHSWQRADLGAYLNPRPPAPEAWSEPVLLAKGSAAYSDLQSMGTGPDGSPLFGCLYEANDYEEIVFLMFTLKQAFPAEYLPQ

SEQ ID NO: 59 - protein, 380 aa, Artificial Sequence
  Description of Artificial Sequence: Synthetic polypeptide
DASLPYLQKESVFQSGAHAYRIPALLYLPGQQSLLAFAEQRASKKDEHAELIVLRRGDYDAPTHQVQWQAQEVVAQARLDGHRSMNPCPLYDAQTGTLFLFFIAIPGQVTEQQQLQTRANVTRLCQVTSTDHGRTWSSPRDLTDAAIGPAYREWSTFAVGPGHCLQLHDRARSLVVPAYAYRKLHPKQRPIPSAFCFLSHDHGRTWARGHFVAQDTLECQVAEVETGEQRVVTLNARSHLRARVQAQSTNDGLDFQESQLVKKLVEPPPQGCQGSVISFPSPRSGPGSPAQWLLYTHPTHSWQRADLGAYLNPRPPAPEAWSEPVLLAKGSCAYSDLQSMGTGPDGSPLFGCLYEANDYEEIVFLMFTLKQAFPAEYLPQ

SEQ ID NO: 60 - protein, 380 aa, Artificial Sequence
  Description of Artificial Sequence: Synthetic polypeptide
AASLPYLQKESVFQSGAHAYRIPALLYLPGQQSLLAFAEQRASKKDEHAELIVLRRGDYDAPTHQVQWQAQEVVAQARLDGHRSMNPCPLYDAQTGTLFLFFIAIPGQVTEQQQLQTRANVTRLCQVTSTDHGRTWSSPRDLTDAAIGPAYREWSTFAVGPGHCLQLHDRARSLVVPAYAYRKLHPKQRPIPSAFCFLSHDHGRTWARGHFVAQDTLECQVAEVETGEQRVVTLNARSHLRARVQAQSTNDGLDFQESQLVKKLVEPPPQGCQGSVISFPSPRSGPGSPAQWLLYTHPTHSWQRADLGAYLNPRPPAPEAWSEPVLLAKGSAAYSDLQSMGTGPDGSPLFGCLYEANDYEEIVFLMFTLKQAFPAEYLPQ

SEQ ID NO: 61 - protein, 380 aa, Artificial Sequence
  Description of Artificial Sequence: Synthetic polypeptide
MASLPYLQKESVFQSGAHAYRIPALLYLPGQQSLLAFAEQRASKKDEHAELIVLRRGDYDAPTHQVQWQAQEVVAQARLDGHRSMNPCPLYDAQTGTLFLFFIAIPGQVTEQQQLQTRANVTRLCQVTSTDHGRTWSSPRDLTDAAIGPAYREWSTFAVGPGHCLQLHDRARSLVVPAYAYRKLHPKQRPIPSAFCFLSHDHGRTWARGHFVAQDTLECQVAEVETGEQRVVTLNARSHLRARVQAQSTNDGLDFQESQLVKKLVEPPPQGCQGSVISFPSPRSGPGSPAQWLLYTHPTHSWQRADLGAYLNPRPPAPEAWSEPVLLAKGSAAYSDLQSMGTGPDGSPLFGCLYEANDYEEIVFLMFTLKQAFPAEYLPQ

SEQ ID NO: 62 - protein, 380 aa, Artificial Sequence
  Description of Artificial Sequence: Synthetic polypeptide
AASLPYLQKESVFQSGAHAYRIPALLYLPGQQSLLAFAEQRASKKDEHAELIVLRRGDYDAPTHQVQWQAQEVVAQARLDGHRSMNPCPLYDAQTGTLFLFFIAIPGQVTEQQQLQTRANVTRLCQVTSTDHGRTWSSPRDLTDAAIGPAYREWSTFAVGPGHCLQLHDRARSLVVPAYAYRKLHPKQRPIPSAFCFLSHDHGRTWARGHFVAQDTLECQVAEVETGEQRVVTLNARSHLRARVQAQSTNDGLDFQESQLVKKLVEPPPQGCQGSVISFPSPRSGPGSPAQWLLYTHPTHSWQRADLGAYLNPRPPAPEAWSEPVLLAKGSCAYSDLQSMGTGPDGSPLFGCLYEANDYEEIVFLMFTLKQAFPAEYLPQ

SEQ ID NO: 63 - protein, 450 aa, Artificial Sequence
  Description of Artificial Sequence: Synthetic polypeptide
EVQLLESGGGLVQPGGSLRLSCAASGFTFSSYIMMWVRQAPGKGLEWVSSIYPSGGITFYADTVKGRFTISRDNSKNTLYLQMNSLRAEDTAVYYCARIKLGTVTTVDYWGQGTLVTVSSASTKGPSVFPLAPSSKSTSGGTAALGCLVKDYFPEPVTVSWNSGALTSGVHTFPAVLQSSGLYSLSSVVTVPSSSLGTQTYICNVNHKPSNTKVDKKVEPKSCDKTHTCPPCPAPELLGGPSVFLFPPKPKDTLMISRTPEVTCVVVDVSHEDPEVKFNWYVDGVEVHNAKTKPREEQYNSTYRVVSVLTVLHQDWLNGKEYKCKVSNKALPAPIEKTISKAKGQPREPQVYTLPPSREEMTKNQVSLTCLVKGFYPSDIAVEWESNGQPENNYKTTPPVLDSDGSFFLYSKLTVDKSRWQQGNVFSCSVMHEALHNHYTQKSLSLSPGK

SEQ ID NO: 64 - protein, 216 aa, Artificial Sequence
  Description of Artificial Sequence: Synthetic polypeptide
QSALTQPASVSGSPGQSITISCTGTSSDVGGYNYVSWYQQHPGKAPKLMIYDVSNRPSGVSNRFSGSKSGNTASLTISGLQAEDEADYYCSSYTSSSTRVFGTGTKVTVLGQPKANPTVTLFPPSSEELQANKATLVCLISDFYPGAVTVAWKADGSPVKAGVETTKPSKQSNNKYAASSYLSLTPEQWKSHRSYSCQVTHEGSTVEKTVAPTECS

SEQ ID NO: 65 - protein, 216 aa, Artificial Sequence; identical to SEQ ID NO: 64
  Description of Artificial Sequence: Synthetic polypeptide

SEQ ID NO: 66 - protein, 450 aa, Artificial Sequence
  Description of Artificial Sequence: Synthetic polypeptide
EVQLLESGGGLVQPGGSLRLSCAASGFTFSSYIMMWVRQAPGKGLEWVSSIYPSGGITFYADTVKGRFTISRDNSKNTLYLQMNSLRAEDTAVYYCARIKLGTVTTVDYWGQGTLVTVSSASTKGPSVFPLAPSSKSTSGGTAALGCLVKDYFPEPVTVSWNSGALTSGVHTFPAVLQSSGLYSLSSVVTVPSSSLGTQTYICNVNHKPSNTKVDKKVEPKSCDKTHTCPPCPAPELLGGPSVFLFPPKPKDTLMISRTPEVTCVVVDVSHEDPEVKFNWYVDGVEVHNAKTKPREEQYNSTYRVVSVLTVLHQDWLNGKEYKCKVSNKALPAPIEKTISKAKGQPREPQVYTLPPSREEMTKNQVSLYCLVKGFYPSDIAVEWESNGQPENNYKTTPPVLDSDGSFFLYSKLTVDKSRWQQGNVFSCSVMHEALHNHYTQKSLSLSPGK

SEQ ID NO: 67 - protein, 617 aa, Artificial Sequence
  Description of Artificial Sequence: Synthetic polypeptide
DASLPYLQKESVFQSGAHAYRIPALLYLPGQQSLLAFAEQRASKKDEHAELIVLRRGDYDAGTHQVQWQAQEVVAQARLDGHRSMNPCPLYDEQTGTLFLFFIAIPGQVTEQQQLQTRANVTRLCQVTSTDHGRTWSSPRDLTDAAIGPAYREWSTFAVGPGHCLQLHDRARSLVVPAYAYRKLHPKQRPIPSAFCFLSHDHGRTWARGHFVAQDTLECQVAEVETGEQRVVTLNARSHLRARVQAQSTNDGLDFQESQLVKKLVEPPPQGCQGSVISFPSPRSGPGSPAQWLLYTHPTHSWQRADLGAYLNPRPPAPEAWSEPVLLAKGSAAYSDLQSMGTGPDGSPLFGCLYEANDYEEIVFLMFTLKQAFPAEYLPQGGGGSGGGGSDKTHTCPPCPAPELLGGPSVFLFPPKPKDTLMISRTPEVTCVVVDVSHEDPEVKFNWYVDGVEVHNAKTKPREEQYNSTYRVVSVLTVLHQDWLNGKEYKCKVSNKALPAPIEKTISKAKGQPREPQVYTLPPSREEMTKNQVSLTCLVKGFYPSDIAVEWESNGQPENNYKTTPPVLDSDGSFFLTSKLTVDKSRWQQGNVFSCSVMHEALHNHYTQKSLSLSPGK

SEQ ID NO: 68 - protein, 617 aa, Artificial Sequence
  Description of Artificial Sequence: Synthetic polypeptide
DASLPYLQDESVFQSGAHAYRIPALLYLPGQQSLLAFAEQRASKKDEHAELIVLRRGDYDAPTHQVQWQAQEVVAQARLDGHRSMNPCPLYDEQTGTLFLFFIAIPGQVTEQQQLQTRANVTRLCQVTSTDHGRTWSSPRDLTDAAIGPAYREWSTFAVGPGHCLQLHDRARSLVVPAYAYRKLHPKQRPIPSAFCFLSHDHGRTWARGHFVAQDTLECQVAEVETGEQRVVTLNARSHLRARVQAQSTNDGLDFQESQLVKKLVEPPPQGCQGSVISFPSPRSGPGSPAQWLLYTHPTHSWQRADLGAYLNPRPPAPEAWSEPVLLAKGSAAYSDLQSMGTGPDGSPLFGCLYEANDYEEIRFIMFTLKQAFPAEYLPQGGGGSGGGGSDKTHTCPPCPAPELLGGPSVFLFPPKPKDTLMISRTPEVTCVVVDVSHEDPEVKFNWYVDGVEVHNAKTKPREEQYNSTYRVVSVLTVLHQDWLNGKEYKCKVSNKALPAPIEKTISKAKGQPREPQVYTLPPSREEMTKNQVSLTCLVKGFYPSDIAVEWESNGQPENNYKTTPPVLDSDGSFFLTSKLTVDKSRWQQGNVFSCSVMHEALHNHYTQKSLSLSPGK

SEQ ID NO: 69 - protein, 617 aa, Artificial Sequence
  Description of Artificial Sequence: Synthetic polypeptide
DASLPYLQKESVFQSGAHAYRIPALLYLPGQQSLLAFAEQRASKKDEHAELIVLRRGDYDANTHQVQWQAQEVVAQARLDGHRSMNPCPLYDAQTGTLFLFFIAIPGQVTEQQQLQTRANVTRLCQVTSTDHGRTWSSPRDLTDAAIGPAYREWSTFAVGPGHCLQLHDRARSLVVPAYAYRKLHPKQRPIPSAFCFLSHDHGRTWARGHFVAQDTLECQVAEVETGEQRVVTLNARSHLRARVQAQSTNDGLDFQESQLVKKLVEPPPQGCQGSVISFPSPRSGPGSPAQWLLYTHPTHSWQRADLGAYLNPRPPAPEAWSEPVLLAKGSAAYSDLQSMGTGPDGSPLFGCLYEANDYEEIVFLMFTLKQAFPAEYLPQGGGGSGGGGSDKTHTCPPCPAPELLGGPSVFLFPPKPKDTLMISRTPEVTCVVVDVSHEDPEVKFNWYVDGVEVHNAKTKPREEQYNSTYRVVSVLTVLHQDWLNGKEYKCKVSNKALPAPIEKTISKAKGQPREPQVYTLPPSREEMTKNQVSLTCLVKGFYPSDIAVEWESNGQPENNYKTTPPVLDSDGSFFLTSKLTVDKSRWQQGNVFSCSVMHEALHNHYTQKSLSLSPGK

SEQ ID NO: 70 - protein, 617 aa, Artificial Sequence
  Description of Artificial Sequence: Synthetic polypeptide
DASLPYLQKESVFQSGAHAYRIPALLYLPGQQSLLAFAEQRASKKDEHAELIVLRRGDYDAPTHQVQWQAQEVVAQARLDGHRSMNPCPLYDAQTGTLFLFFIAIPGQVTEQQQLQTRANVTRLCQVTSTDHGRTWSSPRDLTDAAIGPAYREWSTFAVGPGHCLQLHDRARSLVVPAYAYRKLHPKQRPIPSAFCFLSHDHGRTWARGHFVAQDTLECQVAEVETGEQRVVTLNARSHLRARVQAQSTNDGLDFQESQLVKKLVEPPPAGCQGSVISFPSPRSGPGSPAQWLLYTHPTHRKQRADLGAYLNPRPPAPEAWSEPVLLAKGSAAYSDLQSMGTGPDGSPLFGCLYEANDYEEIVFLMFTLKQAFPAEYLPQGGGGSGGGGSDKTHTCPPCPAPELLGGPSVFLFPPKPKDTLMISRTPEVTCVVVDVSHEDPEVKFNWYVDGVEVHNAKTKPREEQYNSTYRVVSVLTVLHQDWLNGKEYKCKVSNKALPAPIEKTISKAKGQPREPQVYTLPPSREEMTKNQVSLTCLVKGFYPSDIAVEWESNGQPENNYKTTPPVLDSDGSFFLTSKLTVDKSRWQQGNVFSCSVMHEALHNHYTQKSLSLSPGK

SEQ ID NO: 71 - protein, 617 aa, Artificial Sequence
  Description of Artificial Sequence: Synthetic polypeptide
DASLPYLQKESVFQSGAHAYRIPALLYLPGQQSLLAFAEQRASKKDEHAELIVLRRGDYDASTHQVQWQAQEVVAQARLDGHRSMNPCPLYDAQTGTLFLFFIAIPGQVTEQQQLQTRANVTRLCQVTSTDHGRTWSSPRDLTDAAIGPAYREWSTFAVGPGHCLQLHDRARSLVVPAYAYRKLHPKQRPIPSAFCFLSHDHGRTWARGHFVAQDTLECQVAEVETGEQRVVTLNARSHLRARVQAQSTNDGLDFQESQLVKKLVEPPPAGCQGSVISFPSPRSGPGSPAQWLLYTHPTHRKQRADLGAYLNPRPPAPEAWSEPVLLAKGSAAYSDLQSMGTGPDGSPLFGCLYEANDYEEIVFLMFTLKQAFPAEYLPQGGGGSGGGGSDKTHTCPPCPAPELLGGPSVFLFPPKPKDTLMISRTPEVTCVVVDVSHEDPEVKFNWYVDGVEVHNAKTKPREEQYNSTYRVVSVLTVLHQDWLNGKEYKCKVSNKALPAPIEKTISKAKGQPREPQVYTLPPSREEMTKNQVSLTCLVKGFYPSDIAVEWESNGQPENNYKTTPPVLDSDGSFFLTSKLTVDKSRWQQGNVFSCSVMHEALHNHYTQKSLSLSPGK

SEQ ID NO: 72 - protein, 617 aa, Artificial Sequence
  Description of Artificial Sequence: Synthetic polypeptide
DASLPYLQKESVFQSGAHAYRIPALLYLPGQQSLLAFAEQRASKKDEHAELIVLRRGDYDATTHQVQWQAQEVVAQARLDGHRSMNPCPLYDAQTGTLFLFFIAIPGQVTEQQQLQTRANVTRLCQVTSTDHGRTWSSPRDLTDAAIGPAYREWSTFAVGPGHCLQLHDRARSLVVPAYAYRKLHPKQRPIPSAFCFLSHDHGRTWARGHFVAQDTLECQVAEVETGEQRVVTLNARSHLRARVQAQSTNDGLDFQESQLVKKLVEPPPAGCQGSVISFPSPRSGPGSPAQWLLYTHPTHRKQRADLGAYLNPRPPAPEAWSEPVLLAKGSAAYSDLQSMGTGPDGSPLFGCLYEANDYEEIVFLMFTLKQAFPAEYLPQGGGGSGGGGSDKTHTCPPCPAPELLGGPSVFLFPPKPKDTLMISRTPEVTCVVVDVSHEDPEVKFNWYVDGVEVHNAKTKPREEQYNSTYRVVSVLTVLHQDWLNGKEYKCKVSNKALPAPIEKTISKAKGQPREPQVYTLPPSREEMTKNQVSLTCLVKGFYPSDIAVEWESNGQPENNYKTTPPVLDSDGSFFLTSKLTVDKSRWQQGNVFSCSVMHEALHNHYTQKSLSLSPGK

SEQ ID NO: 73 - protein, 617 aa, Artificial Sequence
  Description of Artificial Sequence: Synthetic polypeptide
DASLPYLQKESVFQSGAHAYRIPALLYLPGQQSLLAFAEQRASKKDEHAELIVLRRGDYDANTHQVQWQAQEVVAQARLDGHRSMNPCPLYDAQTGTLFLFFIAIPGQVTEQQQLQTRANVTRLCQVTSTDHGRTWSSPRDLTDAAIGPAYREWSTFAVGPGHCLQLHDRARSLVVPAYAYRKLHPKQRPIPSAFCFLSHDHGRTWARGHFVAQDTLECQVAEVETGEQRVVTLNARSHLRARVQAQSTNDGLDFQESQLVKKLVEPPPAGCQGSVISFPSPRSGPGSPAQWLLYTHPTHRKQRADLGAYLNPRPPAPEAWSEPVLLAKGSAAYSDLQSMGTGPDGSPLFGCLYEANDYEEIVFLMFTLKQAFPAEYLPQGGGGSGGGGSDKTHTCPPCPAPELLGGPSVFLFPPKPKDTLMISRTPEVTCVVVDVSHEDPEVKFNWYVDGVEVHNAKTKPREEQYNSTYRVVSVLTVLHQDWLNGKEYKCKVSNKALPAPIEKTISKAKGQPREPQVYTLPPSREEMTKNQVSLTCLVKGFYPSDIAVEWESNGQPENNYKTTPPVLDSDGSFFLTSKLTVDKSRWQQGNVFSCSVMHEALHNHYTQKSLSLSPGK

SEQ ID NO: 74 - protein, 617 aa, Artificial Sequence
  Description of Artificial Sequence: Synthetic polypeptide
  MOD_RES (1)..(1): Any amino acid
  MOD_RES (6)..(6): Any amino acid
  MOD_RES (9)..(9): Any amino acid
  MOD_RES (62)..(62): Any amino acid
  MOD_RES (93)..(93): Any amino acid
  MOD_RES (187)..(187): Any amino acid
  MOD_RES (270)..(270): Any amino acid
  MOD_RES (301)..(302): Any amino acid
  MOD_RES (332)..(332): Any amino acid
  MOD_RES (363)..(363): Any amino acid
  MOD_RES (365)..(365): Any amino acid
XASLPXLQXESVFQSGAHAYRIPALLYLPGQQSLLAFAEQRASKKDEHAELIVLRRGDYDAXTHQVQWQAQEVVAQARLDGHRSMNPCPLYDXQTGTLFLFFIAIPGQVTEQQQLQTRANVTRLCQVTSTDHGRTWSSPRDLTDAAIGPAYREWSTFAVGPGHCLQLHDRARSLVVPAYAYRKLHPXQRPIPSAFCFLSHDHGRTWARGHFVAQDTLECQVAEVETGEQRVVTLNARSHLRARVQAQSTNDGLDFQESQLVKKLVEPPPXGCQGSVISFPSPRSGPGSPAQWLLYTHPTHXXQRADLGAYLNPRPPAPEAWSEPVLLAKGSXAYSDLQSMGTGPDGSPLFGCLYEANDYEEIXFXMFTLKQAFPAEYLPQGGGGSGGGGSDKTHTCPPCPAPELLGGPSVFLFPPKPKDTLMISRTPEVTCVVVDVSHEDPEVKFNWYVDGVEVHNAKTKPREEQYNSTYRVVSVLTVLHQDWLNGKEYKCKVSNKALPAPIEKTISKAKGQPREPQVYTLPPSREEMTKNQVSLTCLVKGFYPSDIAVEWESNGQPENNYKTTPPVLDSDGSFFLTSKLTVDKSRWQQGNVFSCSVMHEALHNHYTQKSLSLSPGK

SEQ ID NO: 75 - protein, 617 aa, Artificial Sequence
  Description of Artificial Sequence: Synthetic polypeptide
  MOD_RES (1)..(2): Any amino acid
  MOD_RES (4)..(6): Any amino acid
  MOD_RES (9)..(9): Any amino acid
  MOD_RES (44)..(45): Any amino acid
  MOD_RES (54)..(54): Any amino acid
  MOD_RES (62)..(62): Any amino acid
  MOD_RES (69)..(69): Any amino acid
  MOD_RES (78)..(78): Any amino acid
  MOD_RES (93)..(93): Any amino acid
  MOD_RES (107)..(108): Any amino acid
  MOD_RES (112)..(112): Any amino acid
  MOD_RES (125)..(126): Any amino acid
  MOD_RES (150)..(150): Any amino acid
  MOD_RES (164)..(164): Any amino acid
  MOD_RES (171)..(171): Any amino acid
  MOD_RES (187)..(187): Any amino acid
  MOD_RES (196)..(196): Any amino acid
  MOD_RES (217)..(217): Any amino acid
  MOD_RES (249)..(249): Any amino acid
  MOD_RES (251)..(251): Any amino acid
  MOD_RES (257)..(257): Any amino acid
  MOD_RES (270)..(270): Any amino acid
  MOD_RES (272)..(272): Any amino acid
  MOD_RES (292)..(292): Any amino acid
  MOD_RES (301)..(302): Any amino acid
  MOD_RES (325)..(325): Any amino acid
  MOD_RES (332)..(332): Any amino acid
  MOD_RES (352)..(352): Any amino acid
  MOD_RES (363)..(363): Any amino acid
  MOD_RES (365)..(365): Any amino acid
XXSXXXLQXESVFQSGAHAYRIPALLYLPGQQSLLAFAEQRASXXDEHAELIVXRRGDYDAXTHQVQWXAQEVVAQAXLDGHRSMNPCPLYDXQTGTLFLFFIAIPXXVTEXQQLQTRANVTRLXXVTSTDHGRTWSSPRDLTDAAIGPXYREWSTFAVGPGHXLQLHDRXRSLVVPAYAYRKLHPXQRPIPSAFXFLSHDHGRTWARGHFVAQDTXECQVAEVETGEQRVVTLNARSHLRARVQAQSXNXGLDFQXSQLVKKLVEPPPXGXQGSVISFPSPRSGPGSPAQXLLYTHPTHXXQRADLGAYLNPRPPAPEAWSEPXLLAKGSXAYSDLQSMGTGPDGSPLFGXLYEANDYEEIXFXMFTLKQAFPAEYLPQGGGGSGGGGSDKTHTCPPCPAPELLGGPSVFLFPPKPKDTLMISRTPEVTCVVVDVSHEDPEVKFNWYVDGVEVHNAKTKPREEQYNSTYRVVSVLTVLHQDWLNGKEYKCKVSNKALPAPIEKTISKAKGQPREPQVYTLPPSREEMTKNQVSLTCLVKGFYPSDIAVEWESNGQPENNYKTTPPVLDSDGSFFLTSKLTVDKSRWQQGNVFSCSVMHEALHNHYTQKSLSLSPGK

SEQ ID NO: 76 - DNA, 648 bp, Artificial Sequence
  Description of Artificial Sequence: Synthetic polynucleotide
caatctgctcttacacagcctgccagcgtgtccggatctcctggccagagcatcaccatcagctgtaccggcaccagctctgatgtcggcggctacaattacgtgtcctggtatcagcagcaccccggcaaggcccctaagctgatgatctacgacgtgtccaacagacccagcggcgtgtccaatagattctccggcagcaagagcggcaacaccgccagcctgacaattagcggactgcaggccgaggacgaggccgattactactgtagcagctacaccagctccagcaccagagtgtttggcaccggcacaaaagtgaccgtgctgggccagcctaaggccaatcctaccgtgacactgttccctccaagcagcgaggaactgcaggctaacaaggccacactcgtgtgcctgatcagcgacttttatcctggcgccgtgaccgtggcctggaaggctgatggatctccagtgaaagccggcgtggaaaccaccaagcctagcaagcagagcaacaacaaatacgccgccagcagctacctgagcctgacacctgagcagtggaagtcccacagatcctacagctgccaagtgacccacgagggcagcaccgtggaaaaaacagtggcccctaccgagtgctct

SEQ ID NO: 77 - DNA, 1350 bp, Artificial Sequence
  Description of Artificial Sequence: Synthetic polynucleotide
gaggtgcagctgctggaatctggcggaggacttgttcagcctggcggctctctgagactgtcttgtgccgccagcggcttcaccttcagcagctatatcatgatgtgggtccgacaggcccctggcaaaggccttgaatgggtgtccagcatctatcccagcggcggcatcaccttttacgccgacacagtgaagggcagattcaccatcagccgggacaacagcaagaacaccctgtacctgcagatgaacagcctgagagccgaggacaccgccgtgtactactgcgccagaatcaagctgggcaccgtgaccaccgtggattattggggacagggcaccctggtcaccgtgtcatctgctagcaccaagggcccatccgtcttccccctggcaccctcctccaagagcacctctgggggcacagcggccctgggctgcctggtcaaggactacttccccgaaccggtgacggtgtcctggaactcaggcgctctgaccagcggcgtgcacaccttcccggctgtcctacagtcctcaggactctactccctcagcagcgtggtgaccgtgccctccagcagcttgggcacccagacctacatctgcaacgtgaatcacaagcccagcaacaccaaggtggacaagaaagttgagcccaaatcttgtgacaaaactcacacatgcccaccgtgcccagcacctgaactcctggggggaccgtcagtcttcctcttccccccaaaacccaaggacaccctcatgatctcccggacccctgaggtcacatgcgtggtggtggacgtgagccacgaagaccctgaggtcaagttcaactggtacgtggacggcgtggaggtgcataatgccaagacaaagccgcgggaggagcagtacaacagcacgtaccgtgtggtcagcgtcctcaccgtcctgcaccaggactggctgaatggcaaggagtacaagtgcaaggtctccaacaaagccctcccagcccccatcgagaaaaccatctccaaagccaaagggcagccccgagaaccacaggtctacaccctgcccccatcccgggaggagatgaccaagaaccaggtcagcctgtactgcctggtcaaaggcttctatcccagcgacatcgccgtggagtgggagagcaatgggcagccggagaacaactacaagaccacgcctcccgtgctggactccgacggctccttcttcctctatagcaagctcaccgtggacaagagcaggtggcagcaggggaacgtcttctcatgctccgtgatgcatgaggctctgcacaaccactacacgcagaagagcctctccctgtctccgggtaaa

SEQ ID NO: 78 - protein, 612 aa, Artificial Sequence
  Description of Artificial Sequence: Synthetic polypeptide
DASLPYLQKESVFQSGAHAYRIPALLYLPGQQSLLAFAEQRASKKDEHAELIVLRRGDYDAGTHQVQWQAQEVVAQARLDGHRSMNPCPLYDEQTGTLFLFFIAIPGQVTEQQQLQTRANVTRLCQVTSTDHGRTWSSPRDLTDAAIGPAYREWSTFAVGPGHCLQLHDRARSLVVPAYAYRKLHPKQRPIPSAFCFLSHDHGRTWARGHFVAQDTLECQVAEVETGEQRVVTLNARSHLRARVQAQSTNDGLDFQESQLVKKLVEPPPQGCQGSVISFPSPRSGPGSPAQWLLYTHPTHSWQRADLGAYLNPRPPAPEAWSEPVLLAKGSAAYSDLQSMGTGPDGSPLFGCLYEANDYEEIVFLMFTLKQAFPAEYLPQGGGGSDKTHTCPPCPAPELLGGPSVFLFPPKPKDTLMISRTPEVTCVVVDVSHEDPEVKFNWYVDGVEVHNAKTKPREEQYNSTYRVVSVLTVLHQDWLNGKEYKCKVSNKALPAPIEKTISKAKGQPREPQVYTLPPSREEMTKNQVSLTCLVKGFYPSDIAVEWESNGQPENNYKTTPPVLDSDGSFFLTSKLTVDKSRWQQGNVFSCSVMHEALHNHYTQKSLSLSPGK

SEQ ID NO: 79 - DNA, 1836 bp, Artificial Sequence
  Description of Artificial Sequence: Synthetic polynucleotide
gatgcatctctgccttacctgcagaaagaaagcgtgttccagtctggcgcccacgcctacagaattcccgctctgctgtatctgccaggccagcagtctctgctggctttcgctgaacagcgggccagcaagaaggatgagcacgccgaactgatcgtgctgcggagaggcgattacgacgccggcacacatcaggtgcagtggcaggctcaagaggtggtggctcaggctagactggacggccacagatctatgaacccctgtcctctgtacgatgaacagaccggcacactgtttctgttctttatcgctatccccggccaagtgaccgagcagcagcagctgcagacaagagccaacgtgaccagactgtgtcaagtgacctccaccgaccacggcagaacctggtctagccctagagatctgaccgacgccgccatcggacctgcctatagagagtggtccaccttcgccgttggacctggacactgtctccagctgcacgacagggctagatctctggtggtgcctgcctacgcctatagaaagctgcaccccaaacagcggcctattcctagcgccttctgctttctgagccacgatcacggcaggacatgggccagaggacatttcgtggcccaggacacactggaatgccaggtggccgaagtggaaaccggcgagcagagagtcgtgaccctgaacgccagatctcacctgagagccagagtgcaggcccagagcacaaacgacggcctggatttccaagagagccagctggtcaagaaactggtggaacctcctccacagggctgtcagggaagcgtgatcagctttccatctcctagaagcggccctggctctcctgctcagtggctgctgtatacacaccccacacacagctggcagagagccgatctgggcgcctacctgaatcctagacctcctgctcctgaggcttggagcgaacctgttctgctggccaagggcagcgctgcctacagcgatctgcagtctatgggcacaggccctgatggcagccctctgtttggctgtctgtacgaggccaacgactacgaagagatcgtgttcctgatgttcaccctgaagcaggcctttccagccgagtacctgcctcaaggcggaggcggatccgacaaaactcacacatgcccaccgtgcccagcacctgaactcctggggggaccgtcagtcttcctcttccccccaaaacccaaggacaccctcatgatctcccggacccctgaggtcacatgcgtggtggtggacgtgagccacgaagaccctgaggtcaagttcaactggtacgtggacggcgtggaggtgcataatgccaagacaaagccgcgggaggagcagtacaacagcacgtaccgtgtggtcagcgtcctcaccgtcctgcaccaggactggctgaatggcaaggagtacaagtgcaaggtctccaacaaagccctcccagcccccatcgagaaaaccatctccaaagccaaagggcagccccgagaaccacaggtctacaccctgcccccatcccgggaggagatgaccaagaaccaggtcagcctgacctgcctggtcaaaggcttctatcccagcgacatcgccgtggagtgggagagcaatgggcagccggagaacaactacaagaccacgcctcccgtgctggactccgacggctccttcttcctcactagcaagctcaccgtggacaagagcaggtggcagcaggggaacgtcttctcatgctccgtgatgcatgaggctctgcacaaccactacacgcagaagagcctctccctgtctccgggtaaa

SEQ ID NO: 80 - DNA, 1140 bp, Artificial Sequence
  Description of Artificial Sequence: Synthetic polynucleotide
gatgcatctctgccttacctgcagaaagaaagcgtgttccagtctggcgcccacgcctacagaattcccgctctgctgtatctgccaggccagcagtctctgctggctttcgctgaacagcgggccagcaagaaggatgagcacgccgaactgatcgtgctgcggagaggcgattacgacgccggcacacatcaggtgcagtggcaggctcaagaggtggtggctcaggctagactggacggccacagatctatgaacccctgtcctctgtacgatgaacagaccggcacactgtttctgttctttatcgctatccccggccaagtgaccgagcagcagcagctgcagacaagagccaacgtgaccagactgtgtcaagtgacctccaccgaccacggcagaacctggtctagccctagagatctgaccgacgccgccatcggacctgcctatagagagtggtccaccttcgccgttggacctggacactgtctccagctgcacgacagggctagatctctggtggtgcctgcctacgcctatagaaagctgcaccccaaacagcggcctattcctagcgccttctgctttctgagccacgatcacggcaggacatgggccagaggacatttcgtggcccaggacacactggaatgccaggtggccgaagtggaaaccggcgagcagagagtcgtgaccctgaacgccagatctcacctgagagccagagtgcaggcccagagcacaaacgacggcctggatttccaagagagccagctggtcaagaaactggtggaacctcctccacagggctgtcagggaagcgtgatcagctttccatctcctagaagcggccctggctctcctgctcagtggctgctgtatacacaccccacacacagctggcagagagccgatctgggcgcctacctgaatcctagacctcctgctcctgaggcttggagcgaacctgttctgctggccaagggcagcgctgcctacagcgatctgcagtctatgggcacaggccctgatggcagccctctgtttggctgtctgtacgaggccaacgactacgaagagatcgtgttcctgatgttcaccctgaagcaggcctttccagccgagtacctgcctcaa

SEQ ID NO: 81 - protein, 612 aa, Artificial Sequence
  Description of Artificial Sequence: Synthetic polypeptide
DASLPYLQKESVFQSGAHAYRIPALLYLPGQQSLLAFAEQRASKKDEHAELIVLRRGDYDAGTHQVQWQAQEVVAQARLDGHRSMNPCPLYDEQTGTLFLFFIAIPGQVTEQQQLQTRANVTRLCQVTSTDHGRTWSSPRDLTDAAIGPAYREWSTFAVGPGHCLQLHDRARSLVVPAYAYRKLHPKQRPIPSAFCFLSHDHGRTWARGHFVAQDTLECQVAEVETGEQRVVTLNARSHLRARVQAQSTNDGLDFQESQLVKKLVEPPPQGCQGSVISFPSPRSGPGSPAQWLLYTHPTHSWQRADLGAYLNPRPPAPEAWSEPVLLAKGSAAYSDLQSMGTGPDGSPLFGCLYEANDYEEIVFLMFTLKQAFPAEYLPQEPKSSDKTHTCPPCPAPELLGGPSVFLFPPKPKDTLMISRTPEVTCVVVDVSHEDPEVKFNWYVDGVEVHNAKTKPREEQYNSTYRVVSVLTVLHQDWLNGKEYKCKVSNKALPAPIEKTISKAKGQPREPQVYTLPPSREEMTKNQVSLTCLVKGFYPSDIAVEWESNGQPENNYKTTPPVLDSDGSFFLTSKLTVDKSRWQQGNVFSCSVMHEALHNHYTQKSLSLSPGK

SEQ ID NO: 82 - protein, 612 aa, Artificial Sequence
  Description of Artificial Sequence: Synthetic polypeptide
DASLPYLQDESVFQSGAHAYRIPALLYLPGQQSLLAFAEQRASKKDEHAELIVLRRGDYDAPTHQVQWQAQEVVAQARLDGHRSMNPCPLYDEQTGTLFLFFIAIPGQVTEQQQLQTRANVTRLCQVTSTDHGRTWSSPRDLTDAAIGPAYREWSTFAVGPGHCLQLHDRARSLVVPAYAYRKLHPKQRPIPSAFCFLSHDHGRTWARGHFVAQDTLECQVAEVETGEQRVVTLNARSHLRARVQAQSTNDGLDFQESQLVKKLVEPPPQGCQGSVISFPSPRSGPGSPAQWLLYTHPTHSWQRADLGAYLNPRPPAPEAWSEPVLLAKGSAAYSDLQSMGTGPDGSPLFGCLYEANDYEEIRFIMFTLKQAFPAEYLPQEPKSSDKTHTCPPCPAPELLGGPSVFLFPPKPKDTLMISRTPEVTCVVVDVSHEDPEVKFNWYVDGVEVHNAKTKPREEQYNSTYRVVSVLTVLHQDWLNGKEYKCKVSNKALPAPIEKTISKAKGQPREPQVYTLPPSREEMTKNQVSLTCLVKGFYPSDIAVEWESNGQPENNYKTTPPVLDSDGSFFLTSKLTVDKSRWQQGNVFSCSVMHEALHNHYTQKSLSLSPGK

SEQ ID NO: 83 - protein, 612 aa, Artificial Sequence
  Description of Artificial Sequence: Synthetic polypeptide
DASLPYLQKESVFQSGAHAYRIPALLYLPGQQSLLAFAEQRASKKDEHAELIVLRRGDYDANTHQVQWQAQEVVAQARLDGHRSMNPCPLYDAQTGTLFLFFIAIPGQVTEQQQLQTRANVTRLCQVTSTDHGRTWSSPRDLTDAAIGPAYREWSTFAVGPGHCLQLHDRARSLVVPAYAYRKLHPKQRPIPSAFCFLSHDHGRTWARGHFVAQDTLECQVAEVETGEQRVVTLNARSHLRARVQAQSTNDGLDFQESQLVKKLVEPPPQGCQGSVISFPSPRSGPGSPAQWLLYTHPTHSWQRADLGAYLNPRPPAPEAWSEPVLLAKGSAAYSDLQSMGTGPDGSPLFGCLYEANDYEEIVFLMFTLKQAFPAEYLPQEPKSSDKTHTCPPCPAPELLGGPSVFLFPPKPKDTLMISRTPEVTCVVVDVSHEDPEVKFNWYVDGVEVHNAKTKPREEQYNSTYRVVSVLTVLHQDWLNGKEYKCKVSNKALPAPIEKTISKAKGQPREPQVYTLPPSREEMTKNQVSLTCLVKGFYPSDIAVEWESNGQPENNYKTTPPVLDSDGSFFLTSKLTVDKSRWQQGNVFSCSVMHEALHNHYTQKSLSLSPGK

SEQ ID NO: 84 - protein, 612 aa, Artificial Sequence
  Description of Artificial Sequence: Synthetic polypeptide
DASLPYLQKESVFQSGAHAYRIPALLYLPGQQSLLAFAEQRASKKDEHAELIVLRRGDYDAPTHQVQWQAQEVVAQARLDGHRSMNPCPLYDAQTGTLFLFFIAIPGQVTEQQQLQTRANVTRLCQVTSTDHGRTWSSPRDLTDAAIGPAYREWSTFAVGPGHCLQLHDRARSLVVPAYAYRKLHPKQRPIPSAFCFLSHDHGRTWARGHFVAQDTLECQVAEVETGEQRVVTLNARSHLRARVQAQSTNDGLDFQESQLVKKLVEPPPAGCQGSVISFPSPRSGPGSPAQWLLYTHPTHRKQRADLGAYLNPRPPAPEAWSEPVLLAKGSAAYSDLQSMGTGPDGSPLFGCLYEANDYEEIVFLMFTLKQAFPAEYLPQEPKSSDKTHTCPPCPAPELLGGPSVFLFPPKPKDTLMISRTPEVTCVVVDVSHEDPEVKFNWYVDGVEVHNAKTKPREEQYNSTYRVVSVLTVLHQDWLNGKEYKCKVSNKALPAPIEKTISKAKGQPREPQVYTLPPSREEMTKNQVSLTCLVKGFYPSDIAVEWESNGQPENNYKTTPPVLDSDGSFFLTSKLTVDKSRWQQGNVFSCSVMHEALHNHYTQKSLSLSPGK

SEQ ID NO: 85 - protein, 612 aa, Artificial Sequence
  Description of Artificial Sequence: Synthetic polypeptide
DASLPYLQKESVFQSGAHAYRIPALLYLPGQQSLLAFAEQRASKKDEHAELIVLRRGDYDASTHQVQWQAQEVVAQARLDGHRSMNPCPLYDAQTGTLFLFFIAIPGQVTEQQQLQTRANVTRLCQVTSTDHGRTWSSPRDLTDAAIGPAYREWSTFAVGPGHCLQLHDRARSLVVPAYAYRKLHPKQRPIPSAFCFLSHDHGRTWARGHFVAQDTLECQVAEVETGEQRVVTLNARSHLRARVQAQSTNDGLDFQESQLVKKLVEPPPAGCQGSVISFPSPRSGPGSPAQWLLYTHPTHRKQRADLGAYLNPRPPAPEAWSEPVLLAKGSAAYSDLQSMGTGPDGSPLFGCLYEANDYEEIVFLMFTLKQAFPAEYLPQEPKSSDKTHTCPPCPAPELLGGPSVFLFPPKPKDTLMISRTPEVTCVVVDVSHEDPEVKFNWYVDGVEVHNAKTKPREEQYNSTYRVVSVLTVLHQDWLNGKEYKCKVSNKALPAPIEKTISKAKGQPREPQVYTLPPSREEMTKNQVSLTCLVKGFYPSDIAVEWESNGQPENNYKTTPPVLDSDGSFFLTSKLTVDKSRWQQGNVFSCSVMHEALHNHYTQKSLSLSPGK

SEQ ID NO: 86 - protein, 612 aa, Artificial Sequence
  Description of Artificial Sequence: Synthetic polypeptide
DASLPYLQKESVFQSGAHAYRIPALLYLPGQQSLLAFAEQRASKKDEHAELIVLRRGDYDATTHQVQWQAQEVVAQARLDGHRSMNPCPLYDAQTGTLFLFFIAIPGQVTEQQQLQTRANVTRLCQVTSTDHGRTWSSPRDLTDAAIGPAYREWSTFAVGPGHCLQLHDRARSLVVPAYAYRKLHPKQRPIPSAFCFLSHDHGRTWARGHFVAQDTLECQVAEVETGEQRVVTLNARSHLRARVQAQSTNDGLDFQESQLVKKLVEPPPAGCQGSVISFPSPRSGPGSPAQWLLYTHPTHRKQRADLGAYLNPRPPAPEAWSEPVLLAKGSAAYSDLQSMGTGPDGSPLFGCLYEANDYEEIVFLMFTLKQAFPAEYLPQEPKSSDKTHTCPPCPAPELLGGPSVFLFPPKPKDTLMISRTPEVTCVVVDVSHEDPEVKFNWYVDGVEVHNAKTKPREEQYNSTYRVVSVLTVLHQDWLNGKEYKCKVSNKALPAPIEKTISKAKGQPREPQVYTLPPSREEMTKNQVSLTCLVKGFYPSDIAVEWESNGQPENNYKTTPPVLDSDGSFFLTSKLTVDKSRWQQGNVFSCSVMHEALHNHYTQKSLSLSPGK

SEQ ID NO: 87 - protein, 612 aa, Artificial Sequence
  Description of Artificial Sequence: Synthetic polypeptide
DASLPYLQKESVFQSGAHAYRIPALLYLPGQQSLLAFAEQRASKKDEHAELIVLRRGDYDANTHQVQWQAQEVVAQARLDGHRSMNPCPLYDAQTGTLFLFFIAIPGQVTEQQQLQTRANVTRLCQVTSTDHGRTWSSPRDLTDAAIGPAYREWSTFAVGPGHCLQLHDRARSLVVPAYAYRKLHPKQRPIPSAFCFLSHDHGRTWARGHFVAQDTLECQVAEVETGEQRVVTLNARSHLRARVQAQSTNDGLDFQESQLVKKLVEPPPAGCQGSVISFPSPRSGPGSPAQWLLYTHPTHRKQRADLGAYLNPRPPAPEAWSEPVLLAKGSAAYSDLQSMGTGPDGSPLFGCLYEANDYEEIVFLMFTLKQAFPAEYLPQEPKSSDKTHTCPPCPAPELLGGPSVFLFPPKPKDTLMISRTPEVTCVVVDVSHEDPEVKFNWYVDGVEVHNAKTKPREEQYNSTYRVVSVLTVLHQDWLNGKEYKCKVSNKALPAPIEKTISKAKGQPREPQVYTLPPSREEMTKNQVSLTCLVKGFYPSDIAVEWESNGQPENNYKTTPPVLDSDGSFFLTSKLTVDKSRWQQGNVFSCSVMHEALHNHYTQKSLSLSPGK

SEQ ID NO: 88 - protein, 608 aa, Artificial Sequence
  Description of Artificial Sequence: Synthetic polypeptide
  MOD_RES (1)..(1): Any amino acid
  MOD_RES (6)..(6): Any amino acid
  MOD_RES (9)..(9): Any amino acid
  MOD_RES (62)..(62): Any amino acid
  MOD_RES (93)..(93): Any amino acid
  MOD_RES (187)..(187): Any amino acid
  MOD_RES (270)..(270): Any amino acid
  MOD_RES (301)..(302): Any amino acid
  MOD_RES (332)..(332): Any amino acid
  MOD_RES (363)..(363): Any amino acid
  MOD_RES (365)..(365): Any amino acid
  MOD_RES (381)..(381): Any amino acid
XASLPXLQXESVFQSGAHAYRIPALLYLPGQQSLLAFAEQRASKKDEHAELIVLRRGDYDAXTHQVQWQAQEVVAQARLDGHRSMNPCPLYDXQTGTLFLFFIAIPGQVTEQQQLQTRANVTRLCQVTSTDHGRTWSSPRDLTDAAIGPAYREWSTFAVGPGHCLQLHDRARSLVVPAYAYRKLHPXQRPIPSAFCFLSHDHGRTWARGHFVAQDTLECQVAEVETGEQRVVTLNARSHLRARVQAQSTNDGLDFQESQLVKKLVEPPPXGCQGSVISFPSPRSGPGSPAQWLLYTHPTHXXQRADLGAYLNPRPPAPEAWSEPVLLAKGSXAYSDLQSMGTGPDGSPLFGCLYEANDYEEIXFXMFTLKQAFPAEYLPQXDKTHTCPPCPAPELLGGPSVFLFPPKPKDTLMISRTPEVTCVVVDVSHEDPEVKFNWYVDGVEVHNAKTKPREEQYNSTYRVVSVLTVLHQDWLNGKEYKCKVSNKALPAPIEKTISKAKGQPREPQVYTLPPSREEMTKNQVSLTCLVKGFYPSDIAVEWESNGQPENNYKTTPPVLDSDGSFFLTSKLTVDKSRWQQGNVFSCSVMHEALHNHYTQKSLSLSPGK

SEQ ID NO: 89 - protein, 608 aa, Artificial Sequence
  Description of Artificial Sequence: Synthetic polypeptide
  MOD_RES (1)..(2): Any amino acid
  MOD_RES (4)..(6): Any amino acid
  MOD_RES (9)..(9): Any amino acid
  MOD_RES (44)..(45): Any amino acid
  MOD_RES (54)..(54): Any amino acid
  MOD_RES (62)..(62): Any amino acid
  MOD_RES (69)..(69): Any amino acid
  MOD_RES (78)..(78): Any amino acid
  MOD_RES (93)..(93): Any amino acid
  MOD_RES (107)..(108): Any amino acid
  MOD_RES (112)..(112): Any amino acid
  MOD_RES (125)..(126): Any amino acid
  MOD_RES (150)..(150): Any amino acid
  MOD_RES (164)..(164): Any amino acid
  MOD_RES (171)..(171): Any amino acid
  MOD_RES (187)..(187): Any amino acid
  MOD_RES (196)..(196): Any amino acid
  MOD_RES (217)..(217): Any amino acid
  MOD_RES (249)..(249): Any amino acid
  MOD_RES (251)..(251): Any amino acid
  MOD_RES (257)..(257): Any amino acid
  MOD_RES (270)..(270): Any amino acid
  MOD_RES (272)..(272): Any amino acid
  MOD_RES (292)..(292): Any amino acid
  MOD_RES (301)..(302): Any amino acid
  MOD_RES (325)..(325): Any amino acid
  MOD_RES (332)..(332): Any amino acid
  MOD_RES (352)..(352): Any amino acid
  MOD_RES (363)..(363): Any amino acid
  MOD_RES (365)..(365): Any amino acid
  MOD_RES (381)..(381): Any amino acid
XXSXXXLQXESVFQSGAHAYRIPALLYLPGQQSLLAFAEQRASXXDEHAELIVXRRGDYDAXTHQVQWXAQEVVAQAXLDGHRSMNPCPLYDXQTGTLFLFFIAIPXXVTEXQQLQTRANVTRLXXVTSTDHGRTWSSPRDLTDAAIGPXYREWSTFAVGPGHXLQLHDRXRSLVVPAYAYRKLHPXQRPIPSAFXFLSHDHGRTWARGHFVAQDTXECQVAEVETGEQRVVTLNARSHLRARVQAQSXNXGLDFQXSQLVKKLVEPPPXGXQGSVISFPSPRSGPGSPAQXLLYTHPTHXXQRADLGAYLNPRPPAPEAWSEPXLLAKGSXAYSDLQSMGTGPDGSPLFGXLYEANDYEEIXFXMFTLKQAFPAEYLPQXDKTHTCPPCPAPELLGGPSVFLFPPKPKDTLMISRTPEVTCVVVDVSHEDPEVKFNWYVDGVEVHNAKTKPREEQYNSTYRVVSVLTVLHQDWLNGKEYKCKVSNKALPAPIEKTISKAKGQPREPQVYTLPPSREEMTKNQVSLTCLVKGFYPSDIAVEWESNGQPENNYKTTPPVLDSDGSFFLTSKLTVDKSRWQQGNVFSCSVMHEALHNHYTQKSLSLSPGK

SEQ ID NO: 90 - protein, 10 aa, Artificial Sequence
  Description of Artificial Sequence: Synthetic peptide
GGGGSGGGGS

SEQ ID NO: 91 - protein, 5 aa, Artificial Sequence
  Description of Artificial Sequence: Synthetic peptide
EPKSS

SEQ ID NO: 92 - protein, 232 aa, Artificial Sequence
  Description of Artificial Sequence: Synthetic polypeptide
EPKSCDKTHTCPPCPAPELLGGPSVFLFPPKPKDTLMISRTPEVTCVVVDVSHEDPEVKFNWYVDGVEVHNAKTKPREEQYNSTYRVVSVLTVLHQDWLNGKEYKCKVSNKALPAPIEKTISKAKGQPREPQVYTLPPSREEMTKNQVSLTCLVKGFYPSDIAVEWESNGQPENNYKTTPPVLDSDGSFFLTSKLTVDKSRWQQGNVFSCSVMHEALHNHYTQKSLSLSPGK

SEQ ID NO: 93 - protein, 227 aa, Artificial Sequence
  Description of Artificial Sequence: Synthetic polypeptide
DKTHTCPPCPAPELLGGPSVFLFPPKPKDTLMISRTPEVTCVVVDVSHEDPEVKFNWYVDGVEVHNAKTKPREEQYNSTYRVVSVLTVLHQDWLNGKEYKCKVSNKALPAPIEKTISKAKGQPREPQVYTLPPSREEMTKNQVSLYCLVKGFYPSDIAVEWESNGQPENNYKTTPPVLDSDGSFFLYSKLTVDKSRWQQGNVFSCSVMHEALHNHYTQKSLSLSPGK

SEQ ID NO: 94 - protein, 380 aa, Artificial Sequence
  Description of Artificial Sequence: Synthetic polypeptide
DASLPYLQKESVFQSGAHAYRIPALLYLPGQQSLLAFAEQRASKKDEHAELIVLRRGDYDAGTHQVQWQAQEVVAQARLDGHRSMNPCPLYDEQTGTLFLFFIAIPGQVTEQQQLQTRANVTRLCQVTSTDHGRTWSSPRDLTDAAIGPAYREWSTFAVGPGHCLQLHDRARSLVVPAYAYRKLHPKQRPIPSAFCFLSHDHGRTWARGHFVAQDTLECQVAEVETGEQRVVTLNARSHLRARVQAQSTNDGLDFQESQLVKKLVEPPPQGCQGSVISFPSPRSGPGSPAQWLLYTHPTHARQRADLGAYLNPRPPAPEAWSEPVLLAKGSAAYSDLQSMGTGPDGSPLFGCLYEANDYEEIVFLMFTLKQAFPAEYLPQ

SEQ ID NO: 95 - protein, 617 aa, Artificial Sequence
  Description of Artificial Sequence: Synthetic polypeptide
DASLPYLQKESVFQSGAHAYRIPALLYLPGQQSLLAFAEQRASKKDEHAELIVLRRGDYDAGTHQVQWQAQEVVAQARLDGHRSMNPCPLYDEQTGTLFLFFIAIPGQVTEQQQLQTRANVTRLCQVTSTDHGRTWSSPRDLTDAAIGPAYREWSTFAVGPGHCLQLHDRARSLVVPAYAYRKLHPKQRPIPSAFCFLSHDHGRTWARGHFVAQDTLECQVAEVETGEQRVVTLNARSHLRARVQAQSTNDGLDFQESQLVKKLVEPPPQGCQGSVISFPSPRSGPGSPAQWLLYTHPTHARQRADLGAYLNPRPPAPEAWSEPVLLAKGSAAYSDLQSMGTGPDGSPLFGCLYEANDYEEIVFLMFTLKQAFPAEYLPQGGGGSGGGGSDKTHTCPPCPAPELLGGPSVFLFPPKPKDTLMISRTPEVTCVVVDVSHEDPEVKFNWYVDGVEVHNAKTKPREEQYNSTYRVVSVLTVLHQDWLNGKEYKCKVSNKALPAPIEKTISKAKGQPREPQVYTLPPSREEMTKNQVSLTCLVKGFYPSDIAVEWESNGQPENNYKTTPPVLDSDGSFFLTSKLTVDKSRWQQGNVFSCSVMHEALHNHYTQKSLSLSPGK

SEQ ID NO: 96 - protein, 612 aa, Artificial Sequence
  Description of Artificial Sequence: Synthetic polypeptide
DASLPYLQKESVFQSGAHAYRIPALLYLPGQQSLLAFAEQRASKKDEHAELIVLRRGDYDAGTHQVQWQAQEVVAQARLDGHRSMNPCPLYDEQTGTLFLFFIAIPGQVTEQQQLQTRANVTRLCQVTSTDHGRTWSSPRDLTDAAIGPAYREWSTFAVGPGHCLQLHDRARSLVVPAYAYRKLHPKQRPIPSAFCFLSHDHGRTWARGHFVAQDTLECQVAEVETGEQRVVTLNARSHLRARVQAQSTNDGLDFQESQLVKKLVEPPPQGCQGSVISFPSPRSGPGSPAQWLLYTHPTHARQRADLGAYLNPRPPAPEAWSEPVLLAKGSAAYSDLQSMGTGPDGSPLFGCLYEANDYEEIVFLMFTLKQAFPAEYLPQEPKSSDKTHTCPPCPAPELLGGPSVFLFPPKPKDTLMISRTPEVTCVVVDVSHEDPEVKFNWYVDGVEVHNAKTKPREEQYNSTYRVVSVLTVLHQDWLNGKEYKCKVSNKALPAPIEKTISKAKGQPREPQVYTLPPSREEMTKNQVSLTCLVKGFYPSDIAVEWESNGQPENNYKTTPPVLDSDGSFFLTSKLTVDKSRWQQGNVFSCSVMHEALHNHYTQKSLSLSPGK

SEQ ID NO: 97 - protein, 380 aa, Artificial Sequence
  Description of Artificial Sequence: Synthetic polypeptide
DASLPYLQKESVFQSGAHAYRIPALLYLPGQQSLLAFAEQRASKKDEHAELIVLRRGDYDAGTHQVQWQAQEVVAQARLDGHRSMNPCPLYDEQTGTLFLFFIAIPGQVTEQQQLQTRANVTRLCYVTSTDHGRTWSSPRDLTDAAIGPAYREWSTFAVGPGHCLQLHDRARSLVVPAYAYRKLHPKQRPIPSAFCFLSHDHGRTWARGHFVAQDTLECQVAEVETGEQRVVTLNARSHLRARVQAQSTNDGLDFQESQLVKKLVEPPPTGCQGSVISFPSPRSGPGSPAQWLLYTHPTHSWQRADLGAYLNPRPPAPEAWSEPVLLAKGSAAYSDLQSMGTGPDGSPLFGCLYEANDYEEIVFLMFTLKQAFPAEYLPQ

SEQ ID NO: 98 - protein, 617 aa, Artificial Sequence
  Description of Artificial Sequence: Synthetic polypeptide
DASLPYLQKESVFQSGAHAYRIPALLYLPGQQSLLAFAEQRASKKDEHAELIVLRRGDYDAGTHQVQWQAQEVVAQARLDGHRSMNPCPLYDEQTGTLFLFFIAIPGQVTEQQQLQTRANVTRLCYVTSTDHGRTWSSPRDLTDAAIGPAYREWSTFAVGPGHCLQLHDRARSLVVPAYAYRKLHPKQRPIPSAFCFLSHDHGRTWARGHFVAQDTLECQVAEVETGEQRVVTLNARSHLRARVQAQSTNDGLDFQESQLVKKLVEPPPTGCQGSVISFPSPRSGPGSPAQWLLYTHPTHSWQRADLGAYLNPRPPAPEAWSEPVLLAKGSAAYSDLQSMGTGPDGSPLFGCLYEANDYEEIVFLMFTLKQAFPAEYLPQGGGGSGGGGSDKTHTCPPCPAPELLGGPSVFLFPPKPKDTLMISRTPEVTCVVVDVSHEDPEVKFNWYVDGVEVHNAKTKPREEQYNSTYRVVSVLTVLHQDWLNGKEYKCKVSNKALPAPIEKTISKAKGQPREPQVYTLPPSREEMTKNQVSLTCLVKGFYPSDIAVEWESNGQPENNYKTTPPVLDSDGSFFLTSKLTVDKSRWQQGNVFSCSVMHEALHNHYTQKSLSLSPGK

SEQ ID NO: 99 - protein, 612 aa, Artificial Sequence
  Description of Artificial Sequence: Synthetic polypeptide
DASLPYLQKESVFQSGAHAYRIPALLYLPGQQSLLAFAEQRASKKDEHAELIVLRRGDYDAGTHQVQWQAQEVVAQARLDGHRSMNPCPLYDEQTGTLFLFFIAIPGQVTEQQQLQTRANVTRLCYVTSTDHGRTWSSPRDLTDAAIGPAYREWSTFAVGPGHCLQLHDRARSLVVPAYAYRKLHPKQRPIPSAFCFLSHDHGRTWARGHFVAQDTLECQVAEVETGEQRVVTLNARSHLRARVQAQSTNDGLDFQESQLVKKLVEPPPTGCQGSVISFPSPRSGPGSPAQWLLYTHPTHSWQRADLGAYLNPRPPAPEAWSEPVLLAKGSAAYSDLQSMGTGPDGSPLFGCLYEANDYEEIVFLMFTLKQAFPAEYLPQEPKSSDKTHTCPPCPAPELLGGPSVFLFPPKPKDTLMISRTPEVTCVVVDVSHEDPEVKFNWYVDGVEVHNAKTKPREEQYNSTYRVVSVLTVLHQDWLNGKEYKCKVSNKALPAPIEKTISKAKGQPREPQVYTLPPSREEMTKNQVSLTCLVKGFYPSDIAVEWESNGQPENNYKTTPPVLDSDGSFFLTSKLTVDKSRWQQGNVFSCSVMHEALHNHYTQKSLSLSPGK

SEQ ID NO: 100 - protein, 380 aa, Artificial Sequence
  Description of Artificial Sequence: Synthetic polypeptide
DASLPYLQKESVFQSGAHAYRIPALLYLPGQQSLLAFAEQRASKKDEHAELIVLRRGDYDAGTHQVQWQAQEVVAQARLDGHRSMNPCPLYDEQTGTLFLFFIAIPGQVTEQQQLQTRANVTRLCYVTSTDHGRTWSSPRDLTDAAIGPAYREWSTFAVGPGHCLQLHDRARSLVVPAYAYRKLHPKQRPIPSAFCFLSHDHGRTWARGHFVAQDTLECQVAEVETGEQRVVTLNARSHLRFRVQAQSTNDGLDFQESQLVKKLVEPPPTGCQGSVISFPSPRSGPGSPAQWLLYTHPTHSWQRADLGAYLNPRPPAPEAWSEPVLLAKGSAAYSDLQSMGTGPDGSPLFGCLYEANDYEEIVFLMFTLKQAFPAEYLPQ

SEQ ID NO: 101 - protein, 617 aa, Artificial Sequence
  Description of Artificial Sequence: Synthetic polypeptide
DASLPYLQKESVFQSGAHAYRIPALLYLPGQQSLLAFAEQRASKKDEHAELIVLRRGDYDAGTHQVQWQAQEVVAQARLDGHRSMNPCPLYDEQTGTLFLFFIAIPGQVTEQQQLQTRANVTRLCYVTSTDHGRTWSSPRDLTDAAIGPAYREWSTFAVGPGHCLQLHDRARSLVVPAYAYRKLHPKQRPIPSAFCFLSHDHGRTWARGHFVAQDTLECQVAEVETGEQRVVTLNARSHLRFRVQAQSTNDGLDFQESQLVKKLVEPPPTGCQGSVISFPSPRSGPGSPAQWLLYTHPTHSWQRADLGAYLNPRPPAPEAWSEPVLLAKGSAAYSDLQSMGTGPDGSPLFGCLYEANDYEEIVFLMFTLKQAFPAEYLPQGGGGSGGGGSDKTHTCPPCPAPELLGGPSVFLFPPKPKDTLMISRTPEVTCVVVDVSHEDPEVKFNWYVDGVEVHNAKTKPREEQYNSTYRVVSVLTVLHQDWLNGKEYKCKVSNKALPAPIEKTISKAKGQPREPQVYTLPPSREEMTKNQVSLTCLVKGFYPSDIAVEWESNGQPENNYKTTPPVLDSDGSFFLTSKLTVDKSRWQQGNVFSCSVMHEALHNHYTQKSLSLSPGK

SEQ ID NO: 102 - protein, 612 aa, Artificial Sequence
  Description of Artificial Sequence: Synthetic polypeptide
DASLPYLQKESVFQSGAHAYRIPALLYLPGQQSLLAFAEQRASKKDEHAELIVLRRGDYDAGTHQVQWQAQEVVAQARLDGHRSMNPCPLYDEQTGTLFLFFIAIPGQVTEQQQLQTRANVTRLCYVTSTDHGRTWSSPRDLTDAAIGPAYREWSTFAVGPGHCLQLHDRARSLVVPAYAYRKLHPKQRPIPSAFCFLSHDHGRTWARGHFVAQDTLECQVAEVETGEQRVVTLNARSHLRFRVQAQSTNDGLDFQESQLVKKLVEPPPTGCQGSVISFPSPRSGPGSPAQWLLYTHPTHSWQRADLGAYLNPRPPAPEAWSEPVLLAKGSAAYSDLQSMGTGPDGSPLFGCLYEANDYEEIVFLMFTLKQAFPAEYLPQEPKSSDKTHTCPPCPAPELLGGPSVFLFPPKPKDTLMISRTPEVTCVVVDVSHEDPEVKFNWYVDGVEVHNAKTKPREEQYNSTYRVVSVLTVLHQDWLNGKEYKCKVSNKALPAPIEKTISKAKGQPREPQVYTLPPSREEMTKNQVSLTCLVKGFYPSDIAVEWESNGQPENNYKTTPPVLDSDGSFFLTSKLTVDKSRWQQGNVFSCSVMHEALHNHYTQKSLSLSPGK

SEQ ID NO: 103 - DNA, 1836 bp, Artificial Sequence; identical to SEQ ID NO: 79
  Description of Artificial Sequence: Synthetic polynucleotide

SEQ ID NO: 104 - protein, 450 aa, Artificial Sequence
  Description of Artificial Sequence: Synthetic polypeptide
EVQLLESGGGLVQPGGSLRLSCAASGFTFSSYIMMWVRQAPGKGLEWVSSIYPSGGITFYADTVKGRFTISRDNSKNTLYLQMNSLRAEDTAVYYCARIKLGTVTTVDYWGQGTLVTVSSASTKGPSVFPLAPSSKSTSGGTAALGCLVKDYFPEPVTVSWNSGALTSGVHTFPAVLQSSGLYSLSSVVTVPSSSLGTQTYICNVNHKPSNTKVDKKVEPKSCDKTHTCPPCPAPELLGGPSVFLFPPKPKDTLMISRTPEVTCVVVDVSHEDPEVKFNWYVDGVEVHNAKTKPREEQYGSTYRVVSVLTVLHQDWLNGKEYKCKVSNKALPAPIEKTISKAKGQPREPQVYTLPPSREEMTKNQVSLYCLVKGFYPSDIAVEWESNGQPENNYKTTPPVLDSDGSFFLYSKLTVDKSRWQQGNVFSCSVMHEALHNHYTQKSLSLSPGK

SEQ ID NO: 105 - DNA, 1350 bp, Artificial Sequence
  Description of Artificial Sequence: Synthetic polynucleotide
gaggtgcagctgctggaatctggcggaggacttgttcagcctggcggctctctgagactgtcttgtgccgccagcggcttcaccttcagcagctatatcatgatgtgggtccgacaggcccctggcaaaggccttgaatgggtgtccagcatctatcccagcggcggcatcaccttttacgccgacacagtgaagggcagattcaccatcagccgggacaacagcaagaacaccctgtacctgcagatgaacagcctgagagccgaggacaccgccgtgtactactgcgccagaatcaagctgggcaccgtgaccaccgtggattattggggacagggcaccctggtcaccgtgtcatctgctagcaccaagggcccatccgtcttccccctggcaccctcctccaagagcacctctgggggcacagcggccctgggctgcctggtcaaggactacttccccgaaccggtgacggtgtcctggaactcaggcgctctgaccagcggcgtgcacaccttcccggctgtcctacagtcctcaggactctactccctcagcagcgtggtgaccgtgccctccagcagcttgggcacccagacctacatctgcaacgtgaatcacaagcccagcaacaccaaggtggacaagaaagttgagcccaaatcttgtgacaaaactcacacatgcccaccgtgcccagcacctgaactcctggggggaccgtcagtcttcctcttccccccaaaacccaaggacaccctcatgatctcccggacccctgaggtcacatgcgtggtggtggacgtgagccacgaagaccctgaggtcaagttcaactggtacgtggacggcgtggaggtgcataatgccaagacaaagccgcgggaggagcagtacggtagcacgtaccgtgtggtcagcgtcctcaccgtcctgcaccaggactggctgaatggcaaggagtacaagtgcaaggtctccaacaaagccctcccagcccccatcgagaaaaccatctccaaagccaaagggcagccccgagaaccacaggtctacaccctgcccccatcccgggaggagatgaccaagaaccaggtcagcctgtactgcctggtcaaaggcttctatcccagcgacatcgccgtggagtgggagagcaatgggcagccggagaacaactacaagaccacgcctcccgtgctggactccgacggctccttcttcctctatagcaagctcaccgtggacaagagcaggtggcagcaggggaacgtcttctcatgctccgtgatgcatgaggctctgcacaaccactacacgcagaagagcctctccctgtctccgggtaaa

SEQ ID NO: 106 - protein, 632 aa, Artificial Sequence
  Description of Artificial Sequence: Synthetic polypeptide
TVEKSVVFKAEGEHFTDQKGNTIVGSGSGGTTKYFRIPAMCTTSKGTIVVFADARHNTASDQSFIDTAAARSTDGGKTWNKKIAIYNDRVNSKLSRVMDPTCIVANIQGRETILVMVGKWNNNDKTWGAYRDKAPDTDWDLVLYKSTDDGVTFSKVETNIHDIVTKNGTISAMLGGVGSGLQLNDGKLVFPVQMVRTKNITTVLNTSFIYSTDGITWSLPSGYCEGFGSENNIIEFNASLVNNIRNSGLRRSFETKDFGKTWTEFPPMDKKVDNRNHGVQGSTITIPSGNKLVAAHSSAQNKNNDYTRSDISLYAHNLYSGEVKLIDDFYPKVGNASGAGYSCLSYRKNVDKETLYVVYEANGSIEFQDLSRHLPVIKSYNGGGGSGGGGSDKTHTCPPCPAPELLGGPSVFLFPPKPKDTLMISRTPEVTCVVVDVSHEDPEVKFNWYVDGVEVHNAKTKPREEQYNSTYRVVSVLTVLHQDWLNGKEYKCKVSNKALPAPIEKTISKAKGQPREPQVYTLPPSREEMTKNQVSLTCLVKGFYPSDIAVEWESNGQPENNYKTTPPVLDSDGSFFLTSKLTVDKSRWQQGNVFSCSVMHEALHNHYTQKSLSLSPGKSGGGGSHHHHHHHH

SEQ ID NO: 107 - DNA, 1896 bp, Artificial Sequence
  Description of Artificial Sequence: Synthetic polynucleotide
acagtggaaaagtccgtggtgttcaaggccgagggcgagcacttcaccgaccagaaaggcaataccatcgtcggctctggcagcggcggcaccaccaagtactttagaatccccgccatgtgcaccaccagcaagggcaccattgtggtgttcgccgacgccagacacaacaccgccagcgatcagagcttcatcgataccgctgccgccagaagtacagacggcggcaagacctggaacaagaagatcgccatctacaacgaccgcgtgaacagcaagctgagcagagtgatggaccctacctgcatcgtggccaacatccagggcagagaaaccatcctggtcatggtcggaaagtggaacaacaacgataagacctggggcgcctacagagacaaggcccctgataccgattgggacctcgtgctgtataagagcaccgacgacggcgtgaccttcagcaaggtggaaacaaacatccacgacatcgtgaccaagaacggcaccatctctgccatgctcggcggcgttggatctggcctgcaactgaatgatggcaagctggtgttccccgtgcagatggtccgaacaaagaacatcaccaccgtgctgaataccagcttcatctactccaccgacggcatcacatggtccctgcctagcggctactgtgaaggctttggcagcgagaacaacatcatcgagttcaacgccagcctggtcaacaacatccggaacagcggcctgcggagaagcttcgagacaaaggacttcggaaagacgtggaccgagtttcctccaatggacaagaaggtggacaaccggaaccacggcgtgcagggcagcacaatcacaatccctagcggcaacaaactggtggccgctcactctagcgcccagaacaagaacaacgattacaccagaagcgacatcagcctgtacgcccacaacctgtactccggcgaagtgaagctgatcgacgacttctaccccaaagtgggcaatgccagcggagccggctacagctgtctgagctaccggaaaaatgtggacaaagaaaccctgtacgtggtgtacgaggccaacggcagcatcgagtttcaggacctgagcagacatctgcccgtgatcaagagctacaatggcggaggtggaagtggcggaggcggatccgacaaaactcacacatgcccaccgtgcccagcacctgaactcctggggggaccgtcagtcttcctcttccccccaaaacccaaggacaccctcatgatctcccggacccctgaggtcacatgcgtggtggtggacgtgagccacgaagaccctgaggtcaagttcaactggtacgtggacggcgtggaggtgcataatgccaagacaaagccgcgggaggagcagtacaacagcacgtaccgtgtggtcagcgtcctcaccgtcctgcaccaggactggctgaatggcaaggagtacaagtgcaaggtctccaacaaagccctcccagcccccatcgagaaaaccatctccaaagccaaagggcagccccgagaaccacaggtctacaccctgcccccatcccgggaggagatgaccaagaaccaggtcagcctgacctgcctggtcaaaggcttctatcccagcgacatcgccgtggagtgggagagcaatgggcagccggagaacaactacaagaccacgcctcccgtgctggactccgacggctccttcttcctcactagcaagctcaccgtggacaagagcaggtggcagcaggggaacgtcttctcatgctccgtgatgcatgaggctctgcacaaccactacacgcagaagagcctctccctgtctccgggtaaaagcggcggaggcggatctcatcatcaccatcatcaccatcac

SEQ ID NO: 108 - protein, 632 aa, Artificial Sequence
  Description of Artificial Sequence: Synthetic polypeptide
TVEKSVVFKAEGEHFTDQKGNTIVGSGSGGTTKYFRIPAMCTTSKGTIVVFADARHNTASDQSFIDTAAARSTDGGKTWNKKIAIYNDRVNSKLSRVMDPTCIVANIQGRETILVMVGKWNNNDKTWGAYRDKAPDTDWDLVLYKSTDDGVTFSKVETNIHDIVTKNGTISAMLGGVGSGLQLNDGKLVFPVQMVRTKNITTVLNTSFIYSTDGITWSLPSGYCEGFGSENNIIEFNASLVNNIRNSGLRRSFETKDFGKTWTEFPPMDKKVDNRNHGVQGSTITIPSGNKLVAAHSSAQNKNNDYTRSDISLYAHNLYSGEVKLIDDFYPKVGNASGAGYSCLSYRKNVDKETLYVVYEANGSIEFQDLSRHLPVIKSYNGGGGSGGGGSDKTHTCPPCPAPELLGGPSVFLFPPKPKDTLMISRTPEVTCVVVDVSHEDPEVKFNWYVDGVEVHNAKTKPREEQYGSTYRVVSVLTVLHQDWLNGKEYKCKVSNKALPAPIEKTISKAKGQPREPQVYTLPPSREEMTKNQVSLTCLVKGFYPSDIAVEWESNGQPENNYKTTPPVLDSDGSFFLTSKLTVDKSRWQQGNVFSCSVMHEALHNHYTQKSLSLSPGKSGGGGSHHHHHHHH

SEQ ID NO: 109 - DNA, 1896 bp, Artificial Sequence
  Description of Artificial Sequence: Synthetic polynucleotide
acagtggaaaagtccgtggtgttcaaggccgagggcgagcacttcaccgaccagaaaggcaataccatcgtcggctctggcagcggcggcaccaccaagtactttagaatccccgccatgtgcaccaccagcaagggcaccattgtggtgttcgccgacgccagacacaacaccgccagcgatcagagcttcatcgataccgctgccgccagaagtacagacggcggcaagacctggaacaagaagatcgccatctacaacgaccgcgtgaacagcaagctgagcagagtgatggaccctacctgcatcgtggccaacatccagggcagagaaaccatcctggtcatggtcggaaagtggaacaacaacgataagacctggggcgcctacagagacaaggcccctgataccgattgggacctcgtgctgtataagagcaccgacgacggcgtgaccttcagcaaggtggaaacaaacatccacgacatcgtgaccaagaacggcaccatctctgccatgctcggcggcgttggatctggcctgcaactgaatgatggcaagctggtgttccccgtgcagatggtccgaacaaagaacatcaccaccgtgctgaataccagcttcatctactccaccgacggcatcacatggtccctgcctagcggctactgtgaaggctttggcagcgagaacaacatcatcgagttcaacgccagcctggtcaacaacatccggaacagcggcctgcggagaagcttcgagacaaaggacttcggaaagacgtggaccgagtttcctccaatggacaagaaggtggacaaccggaaccacggcgtgcagggcagcacaatcacaatccctagcggcaacaaactggtggccgctcactctagcgcccagaacaagaacaacgattacaccagaagcgacatcagcctgtacgcccacaacctgtactccggcgaagtgaagctgatcgacgacttctaccccaaagtgggcaatgccagcggagccggctacagctgtctgagctaccggaaaaatgtggacaaagaaaccctgtacgtggtgtacgaggccaacggcagcatcgagtttcaggacctgagcagacatctgcccgtgatcaagagctacaatggcggaggtggaagtggcggaggcggatccgacaaaactcacacatgcccaccgtgcccagcacctgaactcctggggggaccgtcagtcttcctcttccccccaaaacccaaggacaccctcatgatctcccggacccctgaggtcacatgcgtggtggtggacgtgagccacgaagaccctgaggtcaagttcaactggtacgtggacggcgtggaggtgcataatgccaagacaaagccgcgggaggagcagtacggtagcacgtaccgtgtggtcagcgtcctcaccgtcctgcaccaggactggctgaatggcaaggagtacaagtgcaaggtctccaacaaagccctcccagcccccatcgagaaaaccatctccaaagccaaagggcagccccgagaaccacaggtctacaccctgcccccatcccgggaggagatgaccaagaaccaggtcagcctgacctgcctggtcaaaggcttctatcccagcgacatcgccgtggagtgggagagcaatgggcagccggagaacaactacaagaccacgcctcccgtgctggactccgacggctccttcttcctcactagcaagctcaccgtggacaagagcaggtggcagcaggggaacgtcttctcatgctccgtgatgcatgaggctctgcacaaccactacacgcagaagagcctctccctgtctccgggtaaaagcggcggaggcggatctcatcatcaccatcatcaccatcac

SEQ ID NO: 110 - protein, 715 aa, Artificial Sequence
  Description of Artificial Sequence: Synthetic polypeptide
EVQLLESGGGLVQPGGSLRLSCAASGFTFSSYIMMWVRQAPGKGLEWVSSIYPSGGITFYADTVKGRFTISRDNSKNTLYLQMNSLRAEDTAVYYCARIKLGTVTTVDYWGQGTLVTVSSASTKGPSVFPLAPSSKSTSGGTAALGCLVKDYFPEPVTVSWNSGALTSGVHTFPAVLQSSGLYSLSSVVTVPSSSLGTQTYICNVNHKPSNTKVDKKVEPKSCDKTHTCPPCPAPELLGGPSVFLFPPKPKDTLMISRTPEVTCVVVDVSHEDPEVKFNWYVDGVEVHNAKTKPREEQYNSTYRVVSVLTVLHQDWLNGKEYKCKVSNKALPAPIEKTISKAKGQPREPQVYTLPPSREEMTKNQVSLYCLVKGFYPSDIAVEWESNGQPENNYKTTPPVLDSDGSFFLYSKLTVDKSRWQQGNVFSCSVMHEALHNHYTQKSLSLSPGKGGGGSGGGGSGGGGSQSALTQPASVSGSPGQSITISCTGTSSDVGGYNYVSWYQQHPGKAPKLMIYDVSNRPSGVSNRFSGSKSGNTASLTISGLQAEDEADYYCSSYTSSSTRVFGTGTKVTVLGQPKAGGGGSGGGGSGGGGSEVQLLESGGGLVQPGGSLRLSCAASGFTFSSYIMMWVRQAPGKGLEWVSSIYPSGGITFYADTVKGRFTISRDNSKNTLYLQMNSLRAEDTAVYYCARIKLGTVTTVDYWGQGTLVTVSS

SEQ ID NO: 111 - DNA, 2145 bp, Artificial Sequence
  Description of Artificial Sequence: Synthetic polynucleotide
gaggtgcagctgctggaatctggcggaggacttgttcagcctggcggctctctgagactgtcttgtgccgccagcggcttcaccttcagcagctatatcatgatgtgggtccgacaggcccctggcaaaggccttgaatgggtgtccagcatctatcccagcggcggcatcaccttttacgccgacacagtgaagggcagattcaccatcagccgggacaacagcaagaacaccctgtacctgcagatgaacagcctgagagccgaggacaccgccgtgtactactgcgccagaatcaagctgggcaccgtgaccaccgtggattattggggacagggcaccctggtcaccgtgtcatctgctagcaccaagggcccatccgtcttccccctggcaccctcctccaagagcacctctgggggcacagcggccctgggctgcctggtcaaggactacttccccgaaccggtgacggtgtcctggaactcaggcgctctgaccagcggcgtgcacaccttcccggctgtcctacagtcctcaggactctactccctcagcagcgtggtgaccgtgccctccagcagcttgggcacccagacctacatctgcaacgtgaatcacaagcccagcaacaccaaggtggacaagaaagttgagcccaaatcttgtgacaaaactcacacatgcccaccgtgcccagcacctgaactcctggggggaccgtcagtcttcctcttccccccaaaacccaaggacaccctcatgatctcccggacccctgaggtcacatgcgtggtggtggacgtgagccacgaagaccctgaggtcaagttcaactggtacgtggacggcgtggaggtgcataatgccaagacaaagccgcgggaggagcagtacaacagcacgtaccgtgtggtcagcgtcctcaccgtcctgcaccaggactggctgaatggcaaggagtacaagtgcaaggtctccaacaaagccctcccagcccccatcgagaaaaccatctccaaagccaaagggcagccccgagaaccacaggtctacaccctgcccccatcccgggaggagatgaccaagaaccaggtcagcctgtactgcctggtcaaaggcttctatcccagcgacatcgccgtggagtgggagagcaatgggcagccggagaacaactacaagaccacgcctcccgtgctggactccgacggctccttcttcctctatagcaagctcaccgtggacaagagcaggtggcagcaggggaacgtcttctcatgctccgtgatgcatgaggctctgcacaaccactacacgcagaagagcctaagcttgtctccgggtaaaggaggcggaggatctggcggaggtggaagtggcggaggcggatctcaatctgctcttacacagcctgccagcgtgtccggatctcctggccagagcatcaccatcagctgtaccggcaccagctctgatgtcggcggctacaattacgtgtcctggtatcagcagcaccccggcaaggcccctaagctgatgatctacgacgtgtccaacagacccagcggcgtgtccaatagattctccggcagcaagagcggcaacaccgccagcctgacaattagcggactgcaggccgaggacgaggccgattactactgtagcagctacaccagctccagcaccagagtgtttggcaccggcacaaaagtgaccgtgctgggccagcctaaggccggtggaggtgggtctggagggggtggatctggaggtggcggatcggaggtgcagctgctggaatctggcggaggacttgttcagcctggcggctctctgagactgtcttgtgccgccagcggcttcaccttcagcagctatatcatgatgtgggtccgacaggcccctggcaaaggccttgaatgggtgtccagcatctatcccagcggcggcatcaccttttacgccgacacagtgaagggcagattcaccatcagccgggacaacagcaagaacaccctgtacctgcagatgaacagcctgagagccgaggacaccgccgtgtactactgcgccagaatcaagctgggcaccgtgaccaccgtggattattggggacagggcaccctggtcaccgtgtcatct

SEQ ID NO: 112 - protein, 617 aa, Artificial Sequence; identical to SEQ ID NO: 67
  Description of Artificial Sequence: Synthetic polypeptide

SEQ ID NO: 113 - DNA, 1851 bp, Artificial Sequence
  Description of Artificial Sequence: Synthetic polynucleotide
gatgcatctctgccttacctgcagaaagaaagcgtgttccagtctggcgcccacgcctacagaattcccgctctgctgtatctgccaggccagcagtctctgctggctttcgctgaacagcgggccagcaagaaggatgagcacgccgaactgatcgtgctgcggagaggcgattacgacgccggcacacatcaggtgcagtggcaggctcaagaggtggtggctcaggctagactggacggccacagatctatgaacccctgtcctctgtacgatgaacagaccggcacactgtttctgttctttatcgctatccccggccaagtgaccgagcagcagcagctgcagacaagagccaacgtgaccagactgtgtcaagtgacctccaccgaccacggcagaacctggtctagccctagagatctgaccgacgccgccatcggacctgcctatagagagtggtccaccttcgccgttggacctggacactgtctccagctgcacgacagggctagatctctggtggtgcctgcctacgcctatagaaagctgcaccccaaacagcggcctattcctagcgccttctgctttctgagccacgatcacggcaggacatgggccagaggacatttcgtggcccaggacacactggaatgccaggtggccgaagtggaaaccggcgagcagagagtcgtgaccctgaacgccagatctcacctgagagccagagtgcaggcccagagcacaaacgacggcctggatttccaagagagccagctggtcaagaaactggtggaacctcctccacagggctgtcagggaagcgtgatcagctttccatctcctagaagcggccctggctctcctgctcagtggctgctgtatacacaccccacacacagctggcagagagccgatctgggcgcctacctgaatcctagacctcctgctcctgaggcttggagcgaacctgttctgctggccaagggcagcgctgcctacagcgatctgcagtctatgggcacaggccctgatggcagccctctgtttggctgtctgtacgaggccaacgactacgaagagatcgtgttcctgatgttcaccctgaagcaggcctttccagccgagtacctgcctcaaggcggaggtggaagtggcggaggcggatccgacaaaactcacacatgcccaccgtgcccagcacctgaactcctggggggaccgtcagtcttcctcttccccccaaaacccaaggacaccctcatgatctcccggacccctgaggtcacatgcgtggtggtggacgtgagccacgaagaccctgaggtcaagttcaactggtacgtggacggcgtggaggtgcataatgccaagacaaagccgcgggaggagcagtacaacagcacgtaccgtgtggtcagcgtcctcaccgtcctgcaccaggactggctgaatggcaaggagtacaagtgcaaggtctccaacaaagccctcccagcccccatcgagaaaaccatctccaaagccaaagggcagccccgagaaccacaggtctacaccctgcccccatcccgggaggagatgaccaagaaccaggtcagcctgacctgcctggtcaaaggcttctatcccagcgacatcgccgtggagtgggagagcaatgggcagccggagaacaactacaagaccacgcctcccgtgctggactccgacggctccttcttcctcactagcaagctcaccgtggacaagagcaggtggcagcaggggaacgtcttctcatgctccgtgatgcatgaggctctgcacaaccactacacgcagaagagcctctccctgtctccgggtaaa

SEQ ID NO: 114 - protein, 877 aa, Artificial Sequence
  Description of Artificial Sequence: Synthetic polypeptide
DASLPYLQKESVFQSGAHAYRIPALLYLPGQQSLLAFAEQRASKKDEHAELIVLRRGDYDAGTHQVQWQAQEVVAQARLDGHRSMNPCPLYDEQTGTLFLFFIAIPGQVTEQQQLQTRANVTRLCQVTSTDHGRTWSSPRDLTDAAIGPAYREWSTFAVGPGHCLQLHDRARSLVVPAYAYRKLHPKQRPIPSAFCFLSHDHGRTWARGHFVAQDTLECQVAEVETGEQRVVTLNARSHLRARVQAQSTNDGLDFQESQLVKKLVEPPPQGCQGSVISFPSPRSGPGSPAQWLLYTHPTHSWQRADLGAYLNPRPPAPEAWSEPVLLAKGSAAYSDLQSMGTGPDGSPLFGCLYEANDYEEIVFLMFTLKQAFPAEYLPQEPKSSDKTHTCPPCPAPELLGGPSVFLFPPKPKDTLMISRTPEVTCVVVDVSHEDPEVKFNWYVDGVEVHNAKTKPREEQYNSTYRVVSVLTVLHQDWLNGKEYKCKVSNKALPAPIEKTISKAKGQPREPQVYTLPPSREEMTKNQVSLTCLVKGFYPSDIAVEWESNGQPENNYKTTPPVLDSDGSFFLYSKLTVDKSRWQQGNVFSCSVMHEALHNHYTQKSLSLSPGKGGGGSGGGGSGGGGSQSALTQPASVSGSPGQSITISCTGTSSDVGGYNYVSWYQQHPGKAPKLMIYDVSNRPSGVSNRFSGSKSGNTASLTISGLQAEDEADYYCSSYTSSSTRVFGTGTKVTVLGQPKAGGGGSGGGGSGGGGSEVQLLESGGGLVQPGGSLRLSCAASGFTFSSYIMMWVRQAPGKGLEWVSSIYPSGGITFYADTVKGRFTISRDNSKNTLYLQMNSLRAEDTAVYYCARIKLGTVTTVDYWGQGTLVTVSS

SEQ ID NO: 115 - DNA, 2631 bp, Artificial Sequence
  Description of Artificial Sequence: Synthetic polynucleotide
gatgcatctctgccttacctgcagaaagaaagcgtgttccagtctggcgcccacgcctacagaattcccgctctgctgtatctgccaggccagcagtctctgctggctttcgctgaacagcgggccagcaagaaggatgagcacgccgaactgatcgtgctgcggagaggcgattacgacgccggcacacatcaggtgcagtggcaggctcaagaggtggtggctcaggctagactggacggccacagatctatgaacccctgtcctctgtacgatgaacagaccggcacactgtttctgttctttatcgctatccccggccaagtgaccgagcagcagcagctgcagacaagagccaacgtgaccagactgtgtcaagtgacctccaccgaccacggcagaacctggtctagccctagagatctgaccgacgccgccatcggacctgcctatagagagtggtccaccttcgccgttggacctggacactgtctccagctgcacgacagggctagatctctggtggtgcctgcctacgcctatagaaagctgcaccccaaacagcggcctattcctagcgccttctgctttctgagccacgatcacggcaggacatgggccagaggacatttcgtggcccaggacacactggaatgccaggtggccgaagtggaaaccggcgagcagagagtcgtgaccctgaacgccagatctcacctgagagccagagtgcaggcccagagcacaaacgacggcctggatttccaagagagccagctggtcaagaaactggtggaacctcctccacagggctgtcagggaagcgtgatcagctttccatctcctagaagcggccctggctctcctgctcagtggctgctgtatacacaccccacacacagctggcagagagccgatctgggcgcctacctgaatcctagacctcctgctcctgaggcttggagcgaacctgttctgctggccaagggcagcgctgcctacagcgatctgcagtctatgggcacaggccctgatggcagccctctgtttggctgtctgtacgaggccaacgactacgaagagatcgtgttcctgatgttcaccctgaagcaggcctttccagccgagtacctgcctcaagagcccaaatcttctgacaaaactcacacatgcccaccgtgcccagcacctgaactcctggggggaccgtcagtcttcctcttccccccaaaacccaaggacaccctcatgatctcccggacccctgaggtcacatgcgtggtggtggacgtgagccacgaagaccctgaggtcaagttcaactggtacgtggacggcgtggaggtgcataatgccaagacaaagccgcgggaggagcagtacaacagcacgtaccgtgtggtcagcgtcctcaccgtcctgcaccaggactggctgaatggcaaggagtacaagtgcaaggtctccaacaaagccctcccagcccccatcgagaaaaccatctccaaagccaaagggcagccccgagaaccacaggtctacaccctgcccccatcccgggaggagatgaccaagaaccaggtcagcctgacctgcctggtcaaaggcttctatcccagcgacatcgccgtggagtgggagagcaatgggcagccggagaacaactacaagaccacgcctcccgtgctggactccgacggctccttcttcctctatagcaagctcaccgtggacaagagcaggtggcagcaggggaacgtcttctcatgctccgtgatgcatgaggctctgcacaaccactacacgcagaagagcctaagcttgtctccgggtaaaggaggcggaggatctggcggaggtggaagtggcggaggcggatctcaatctgctcttacacagcctgccagcgtgtccggatctcctggccagagcatcaccatcagctgtaccggcaccagctctgatgtcggcggctacaattacgtgtcctggtatcagcagcaccccggcaaggcccctaagctgatgatctacgacgtgtccaacagacccagcggcgtgtccaatagattctccggcagcaagagcggcaacaccgccagcctgacaattagcggactgcaggccgaggacgaggccgattactactgtagcagctacaccagctccagcaccagagtgtttggcaccggcacaaaagtgaccgtgctgggccagcctaaggccggtggaggtgggtctggagggggtggatctggaggtggcggatcggaggtgcagctgctggaatctggcggaggacttgttcagcctggcggctctctgagactgtcttgtgccgccagcggcttcaccttcagcagctatatcatgatgtgggtccgacaggcccctggcaaaggccttgaatgggtgtccagcatctatcccagcggcggcatcaccttttacgccgacacagtgaagggcagattcaccatcagccgggacaacagcaagaacaccctgtacctgcagatgaacagcctgagagccgaggacaccgccgtgtactactgcgccagaatcaagctgggcaccgtgaccaccgtggattattggggacagggcaccctggtcaccgtgtcatct

SEQ ID NO: 116 - protein, 608 aa, Artificial Sequence
  Description of Artificial Sequence: Synthetic polypeptide
  MOD_RES (1)..(1): Any amino acid
  MOD_RES (6)..(6): Any amino acid
  MOD_RES (9)..(9): Any amino acid
  MOD_RES (62)..(62): Any amino acid
  MOD_RES (93)..(93): Any amino acid
  MOD_RES (126)..(126): Any amino acid
  MOD_RES (187)..(187): Any amino acid
  MOD_RES (242)..(242): Any amino acid
  MOD_RES (270)..(270): Any amino acid
  MOD_RES (301)..(302): Any amino acid
  MOD_RES (332)..(332): Any amino acid
  MOD_RES (363)..(363): Any amino acid
  MOD_RES (365)..(365): Any amino acid
  MOD_RES (381)..(381): Any amino acid
XASLPXLQXESVFQSGAHAYRIPALLYLPGQQSLLAFAEQRASKKDEHAELIVLRRGDYDAXTHQVQWQAQEVVAQARLDGHRSMNPCPLYDXQTGTLFLFFIAIPGQVTEQQQLQTRANVTRLCXVTSTDHGRTWSSPRDLTDAAIGPAYREWSTFAVGPGHCLQLHDRARSLVVPAYAYRKLHPXQRPIPSAFCFLSHDHGRTWARGHFVAQDTLECQVAEVETGEQRVVTLNARSHLRXRVQAQSTNDGLDFQESQLVKKLVEPPPXGCQGSVISFPSPRSGPGSPAQWLLYTHPTHXXQRADLGAYLNPRPPAPEAWSEPVLLAKGSXAYSDLQSMGTGPDGSPLFGCLYEANDYEEIXFXMFTLKQAFPAEYLPQXDKTHTCPPCPAPELLGGPSVFLFPPKPKDTLMISRTPEVTCVVVDVSHEDPEVKFNWYVDGVEVHNAKTKPREEQYNSTYRVVSVLTVLHQDWLNGKEYKCKVSNKALPAPIEKTISKAKGQPREPQVYTLPPSREEMTKNQVSLTCLVKGFYPSDIAVEWESNGQPENNYKTTPPVLDSDGSFFLTSKLTVDKSRWQQGNVFSCSVMHEALHNHYTQKSLSLSPGK

SEQ ID NO: 117 - protein, 608 aa, Artificial Sequence
  Description of Artificial Sequence: Synthetic polypeptide
  MOD_RES (1)..(2): Any amino acid
  MOD_RES (4)..(6): Any amino acid
  MOD_RES (9)..(9): Any amino acid
  MOD_RES (44)..(45): Any amino acid
  MOD_RES (54)..(54): Any amino acid
  MOD_RES (62)..(62): Any amino acid
  MOD_RES (69)..(69): Any amino acid
  MOD_RES (78)..(78): Any amino acid
  MOD_RES (80)..(80): Any amino acid
  MOD_RES (93)..(93): Any amino acid
  MOD_RES (107)..(108): Any amino acid
  MOD_RES (112)..(112): Any amino acid
  MOD_RES (125)..(126): Any amino acid
  MOD_RES (150)..(150): Any amino acid
  MOD_RES (164)..(164): Any amino acid
  MOD_RES (170)..(171): Any amino acid
  MOD_RES (187)..(189): Any amino acid
  MOD_RES (196)..(196): Any amino acid
  MOD_RES (213)..(213): Any amino acid
  MOD_RES (217)..(217): Any amino acid
  MOD_RES (225)..(225): Any amino acid
  MOD_RES (239)..(242): Any amino acid
  MOD_RES (244)..(244): Any amino acid
  MOD_RES (249)..(249): Any amino acid
  MOD_RES (251)..(251): Any amino acid
  MOD_RES (257)..(258): Any amino acid
  MOD_RES (260)..(260): Any amino acid
  MOD_RES (265)..(265): Any amino acid
  MOD_RES (270)..(270): Any amino acid
  MOD_RES (272)..(272): Any amino acid
  MOD_RES (292)..(292): Any amino acid
  MOD_RES (301)..(302): Any amino acid
  MOD_RES (325)..(325): Any amino acid
  MOD_RES (332)..(332): Any amino acid
  MOD_RES (352)..(352): Any amino acid
  MOD_RES (363)..(363): Any amino acid
  MOD_RES (365)..(365): Any amino acid
  MOD_RES (381)..(381): Any amino acid
XXSXXXLQXESVFQSGAHAYRIPALLYLPGQQSLLAFAEQRASXXDEHAELIVXRRGDYDAXTHQVQWXAQEVVAQAXLXGHRSMNPCPLYDXQTGTLFLFFIAIPXXVTEXQQLQTRANVTRLXXVTSTDHGRTWSSPRDLTDAAIGPXYREWSTFAVGPGHXLQLHDXXRSLVVPAYAYRKLHPXXXPIPSAFXFLSHDHGRTWARGHFVXQDTXECQVAEVXTGEQRVVTLNARSXXXXRXQAQSXNXGLDFQXXQXVKKLXEPPPXGXQGSVISFPSPRSGPGSPAQXLLYTHPTHXXQRADLGAYLNPRPPAPEAWSEPXLLAKGSXAYSDLQSMGTGPDGSPLFGXLYEANDYEEIXFXMFTLKQAFPAEYLPQXDKTHTCPPCPAPELLGGPSVFLFPPKPKDTLMISRTPEVTCVVVDVSHEDPEVKFNWYVDGVEVHNAKTKPREEQYNSTYRVVSVLTVLHQDWLNGKEYKCKVSNKALPAPIEKTISKAKGQPREPQVYTLPPSREEMTKNQVSLTCLVKGFYPSDIAVEWESNGQPENNYKTTPPVLDSDGSFFLTSKLTVDKSRWQQGNVFSCSVMHEALHNHYTQKSLSLSPGK

SEQ ID NO: 118 - DNA, 1140 bp, Artificial Sequence
  Description of Artificial Sequence: Synthetic polynucleotide
gatgcatctctgccttacctgcagaaagaaagcgtgttccagtctggcgcccacgcctacagaattcccgctctgctgtatctgccaggccagcagtctctgctggctttcgctgaacagcgggccagcaagaaggatgagcacgccgaactgatcgtgctgcggagaggcgattacgacgccggcacacatcaggtgcagtggcaggctcaagaggtggtggctcaggctagactggacggccacagatctatgaacccctgtcctctgtacgatgaacagaccggcacactgtttctgttctttatcgctatccccggccaagtgaccgagcagcagcagctgcagacaagagccaacgtgaccagactgtgttacgtgacctccaccgaccacggcagaacctggtctagccctagagatctgaccgacgccgccatcggacctgcctatagagagtggtccaccttcgccgttggacctggacactgtctccagctgcacgacagggctagatctctggtggtgcctgcctacgcctatagaaagctgcaccccaaacagcggcctattcctagcgccttctgctttctgagccacgatcacggcaggacatgggccagaggacatttcgtggcccaggacacactggaatgccaggtggccgaagtggaaaccggcgagcagagagtcgtgaccctgaacgccagatctcacctgagattcagagtgcaggcccagagcacaaacgacggcctggatttccaagagagccagctggtcaagaaactggtggaacctcctccaaccggctgtcagggaagcgtgatcagctttccatctcctagaagcggccctggctctcctgctcagtggctgctgtatacacaccccacacacagctggcagagagccgatctgggcgcctacctgaatcctagacctcctgctcctgaggcttggagcgaacctgttctgctggccaagggcagcgctgcctacagcgatctgcagtctatgggcacaggccctgatggcagccctctgtttggctgtctgtacgaggccaacgactacgaagagatcgtgttcctgatgttcaccctgaagcaggcctttccagccgagtacctgcctcaa

SEQ ID NO: 119 - protein, 380 aa, Artificial Sequence
  Description of Artificial Sequence: Synthetic polypeptide
  MOD_RES (1)..(1): Any amino acid
  MOD_RES (6)..(6): Any amino acid
  MOD_RES (9)..(9): Any amino acid
  MOD_RES (62)..(62): Any amino acid
  MOD_RES (93)..(93): Any amino acid
  MOD_RES (126)..(126): Any amino acid
  MOD_RES (187)..(187): Any amino acid
  MOD_RES (242)..(242): Any amino acid
  MOD_RES (270)..(270): Any amino acid
  MOD_RES (301)..(302): Any amino acid
  MOD_RES (332)..(332): Any amino acid
  MOD_RES (363)..(363): Any amino acid
  MOD_RES (365)..(365): Any amino acid
XASLPXLQXESVFQSGAHAYRIPALLYLPGQQSLLAFAEQRASKKDEHAELIVLRRGDYDAXTHQVQWQAQEVVAQARLDGHRSMNPCPLYDXQTGTLFLFFIAIPGQVTEQQQLQTRANVTRLCXVTSTDHGRTWSSPRDLTDAAIGPAYREWSTFAVGPGHCLQLHDRARSLVVPAYAYRKLHPXQRPIPSAFCFLSHDHGRTWARGHFVAQDTLECQVAEVETGEQRVVTLNARSHLRXRVQAQSTNDGLDFQESQLVKKLVEPPPXGCQGSVISFPSPRSGPGSPAQWLLYTHPTHXXQRADLGAYLNPRPPAPEAWSEPVLLAKGSXAYSDLQSMGTGPDGSPLFGCLYEANDYEEIXFXMFTLKQAFPAEYLPQ

SEQ ID NO: 120 - protein, 380 aa, Artificial Sequence
  Description of Artificial Sequence: Synthetic polypeptide
  MOD_RES (1)..(2): Any amino acid
  MOD_RES (4)..(6): Any amino acid
  MOD_RES (9)..(9): Any amino acid
  MOD_RES (44)..(45): Any amino acid
  MOD_RES (54)..(54): Any amino acid
  MOD_RES (62)..(62): Any amino acid
  MOD_RES (69)..(69): Any amino acid
  MOD_RES (78)..(78): Any amino acid
  MOD_RES (80)..(80): Any amino acid
  MOD_RES (93)..(93): Any amino acid
  MOD_RES (107)..(108): Any amino acid
  MOD_RES (112)..(112): Any amino acid
  MOD_RES (125)..(126): Any amino acid
  MOD_RES (150)..(150): Any amino acid
  MOD_RES (164)..(164): Any amino acid
  MOD_RES (170)..(171): Any amino acid
  MOD_RES (187)..(189): Any amino acid
  MOD_RES (196)..(196): Any amino acid
  MOD_RES (213)..(213): Any amino acid
  MOD_RES (217)..(217): Any amino acid
  MOD_RES (225)..(225): Any amino acid
  MOD_RES (239)..(242): Any amino acid
  MOD_RES (244)..(244): Any amino acid
  MOD_RES (249)..(249): Any amino acid
  MOD_RES (251)..(251): Any amino acid
  MOD_RES (257)..(258): Any amino acid
  MOD_RES (260)..(260): Any amino acid
  MOD_RES (265)..(265): Any amino acid
  MOD_RES (270)..(270): Any amino acid
  MOD_RES (272)..(272): Any amino acid
  MOD_RES (292)..(292): Any amino acid
  MOD_RES (301)..(302): Any amino acid
  MOD_RES (325)..(325): Any amino acid
  MOD_RES (332)..(332): Any amino acid
  MOD_RES (352)..(352): Any amino acid
  MOD_RES (363)..(363): Any amino acid
  MOD_RES (365)..(365): Any amino acid
XXSXXXLQXESVFQSGAHAYRIPALLYLPGQQSLLAFAEQRASXXDEHAELIVXRRGDYDAXTHQVQWXAQEVVAQAXLXGHRSMNPCPLYDXQTGTLFLFFIAIPXXVTEXQQLQTRANVTRLXXVTSTDHGRTWSSPRDLTDAAIGPXYREWSTFAVGPGHXLQLHDXXRSLVVPAYAYRKLHPXXXPIPSAFXFLSHDHGRTWARGHFVXQDTXECQVAEVXTGEQRVVTLNARSXXXXRXQAQSXNXGLDFQXXQXVKKLXEPPPXGXQGSVISFPSPRSGPGSPAQXLLYTHPTHXXQRADLGAYLNPRPPAPEAWSEPXLLAKGSXAYSDLQSMGTGPDGSPLFGXLYEANDYEEIXFXMFTLKQAFPAEYLPQ

SEQ ID NO: 121 - protein, 5 aa, Artificial Sequence
  Description of Artificial Sequence: Synthetic peptide
GGGGS

SEQ ID NO: 122 - protein, 612 aa, Artificial Sequence
  Description of Artificial Sequence: Synthetic polypeptide
DASLPYLQKESVFQSGAHAYRIPALLYLPGQQSLLAFAEQRASKKDEHAELIVLRRGDYDAGTHQVQWQAQEVVAQARLDGHRSMNPCPLYDEQTGTLFLFFIAIPGQVTEQQQLQTRANVTRLCYVTSTDHGRTWSSPRDLTDAAIGPAYREWSTFAVGPGHCLQLHDRARSLVVPAYAYRKLHPKQRPIPSAFCFLSHDHGRTWARGHFVAQDTLECQVAEVETGEQRVVTLNARSHLRARVQAQSTNDGLDFQESQLVKKLVEPPPTGCQGSVISFPSPRSGPGSPAQWLLYTHPTHSWQRADLGAYLNPRPPAPEAWSEPVLLAKGSAAYSDLQSMGTGPDGSPLFGCLYEANDYEEIVFLMFTLKQAFPAEYLPQEPKSSDKTHTCPPCPAPELLGGPSVFLFPPKPKDTLMISRTPEVTCVVVDVSHEDPEVKFNWYVDGVEVHNAKTKPREEQYNSTYRVVSVLTVLHQDWLNGKEYKCKVSNKALPAPIEKTISKAKGQPREPQVYTLPPSREEMTKNQVSLYCLVKGFYPSDIAVEWESNGQPENNYKTTPPVLDSDGSFFLYSKLTVDKSRWQQGNVFSCSVMHEALHNHYTQKSLSLSPGK

SEQ ID NO: 123 - protein, 612 aa, Artificial Sequence
  Description of Artificial Sequence: Synthetic polypeptide
DASLPYLQKESVFQSGAHAYRIPALLYLPGQQSLLAFAEQRASKKDEHAELIVLRRGDYDAGTHQVQWQAQEVVAQARLDGHRSMNPCPLYDEQTGTLFLFFIAIPGQVTEQQQLQTRANVTRLCYVTSTDHGRTWSSPRDLTDAAIGPAYREWSTFAVGPGHCLQLHDRARSLVVPAYAYRKLHPKQRPIPSAFCFLSHDHGRTWARGHFVAQDTLECQVAEVETGEQRVVTLNARSHLRFRVQAQSTNDGLDFQESQLVKKLVEPPPTGCQGSVISFPSPRSGPGSPAQWLLYTHPTHSWQRADLGAYLNPRPPAPEAWSEPVLLAKGSAAYSDLQSMGTGPDGSPLFGCLYEANDYEEIVFLMFTLKQAFPAEYLPQEPKSSDKTHTCPPCPAPELLGGPSVFLFPPKPKDTLMISRTPEVTCVVVDVSHEDPEVKFNWYVDGVEVHNAKTKPREEQYNSTYRVVSVLTVLHQDWLNGKEYKCKVSNKALPAPIEKTISKAKGQPREPQVYTLPPSREEMTKNQVSLYCLVKGFYPSDIAVEWESNGQPENNYKTTPPVLDSDGSFFLYSKLTVDKSRWQQGNVFSCSVMHEALHNHYTQKSLSLSPGK

SEQ ID NO: 124 - protein, 450 aa, Artificial Sequence
  Description of Artificial Sequence: Synthetic polypeptide
EVQLLESGGGLVQPGGSLRLSCAASGFTFSSYIMMWVRQAPGKGLEWVSSIYPSGGITFYADTVKGRFTISRDNSKNTLYLQMNSLRAEDTAVYYCARIKLGTVTTVDYWGQGTLVTVSSASTKGPSVFPLAPSSKSTSGGTAALGCLVKDYFPEPVTVSWNSGALTSGVHTFPAVLQSSGLYSLSSVVTVPSSSLGTQTYICNVNHKPSNTKVDKKVEPKSCDKTHTCPPCPAPELLGGPSVFLFPPKPKDTLMISRTPEVTCVVVDVSHEDPEVKFNWYVDGVEVHNAKTKPREEQYNSTYRVVSVLTVLHQDWLNGKEYKCKVSNKALPAPIEKTISKAKGQPREPQVYTLPPSREEMTKNQVSLTCLVKGFYPSDIAVEWESNGQPENNYKTTPPVLDSDGSFFLTSKLTVDKSRWQQGNVFSCSVMHEALHNHYTQKSLSLSPGK

SEQ ID NO: 125 - protein, 250 aa, Artificial Sequence
  Description of Artificial Sequence: Synthetic polypeptide
QSALTQPASVSGSPGQSITISCTGTSSDVGGYNYVSWYQQHPGKAPKLMIYDVSNRPSGVSNRFSGSKSGNTASLTISGLQAEDEADYYCSSYTSSSTRVFGTGTKVTVLGQPKAGGGGSGGGGSGGGGSEVQLLESGGGLVQPGGSLRLSCAASGFTFSSYIMMWVRQAPGKGLEWVSSIYPSGGITFYADTVKGRFTISRDNSKNTLYLQMNSLRAEDTAVYYCARIKLGTVTTVDYWGQGTLVTVSS

SEQ ID NO: 126 - protein, 380 aa, Artificial Sequence
  Description of Artificial Sequence: Synthetic polypeptide
DASLPYLQKESVFQSGAHAYRIPALLYLPGQQSLLAFAEQRASKKDEHAELIVLRRGDYDAGTHQVQWQAQEVVAQARLDGHRSMNPCPLYDEQTGTLFLFFIAIPGQVTEQQQLQTRANVTRLCYVTSTDHGRTWSSPRDLTDAAIGPAYREWSTFAVGPGHCLQLHDRARSLVVPAYAYRKLHPKQRPIPSAFCFLSHDHGRTWARGHFVAQDTLECQVAEVETGEQRVVTLNARSHLRARVQAQSTNDGLDFQESQLVKKLVEPPPQGCQGSVISFPSPRSGPGSPAQWLLYTHPTHSWQRADLGAYLNPRPPAPEAWSEPVLLAKGSAAYSDLQSMGTGPDGSPLFGCLYEANDYEEIVFLMFTLKQAFPAEYLPQ

SEQ ID NO: 127 - protein, 612 aa, Artificial Sequence
  Description of Artificial Sequence: Synthetic polypeptide
DASLPYLQKESVFQSGAHAYRIPALLYLPGQQSLLAFAEQRASKKDEHAELIVLRRGDYDAGTHQVQWQAQEVVAQARLDGHRSMNPCPLYDEQTGTLFLFFIAIPGQVTEQQQLQTRANVTRLCYVTSTDHGRTWSSPRDLTDAAIGPAYREWSTFAVGPGHCLQLHDRARSLVVPAYAYRKLHPKQRPIPSAFCFLSHDHGRTWARGHFVAQDTLECQVAEVETGEQRVVTLNARSHLRARVQAQSTNDGLDFQESQLVKKLVEPPPQGCQGSVISFPSPRSGPGSPAQWLLYTHPTHSWQRADLGAYLNPRPPAPEAWSEPVLLAKGSAAYSDLQSMGTGPDGSPLFGCLYEANDYEEIVFLMFTLKQAFPAEYLPQEPKSSDKTHTCPPCPAPELLGGPSVFLFPPKPKDTLMISRTPEVTCVVVDVSHEDPEVKFNWYVDGVEVHNAKTKPREEQYNSTYRVVSVLTVLHQDWLNGKEYKCKVSNKALPAPIEKTISKAKGQPREPQVYTLPPSREEMTKNQVSLTCLVKGFYPSDIAVEWESNGQPENNYKTTPPVLDSDGSFFLTSKLTVDKSRWQQGNVFSCSVMHEALHNHYTQKSLSLSPGK

SEQ ID NO: 128 - protein, 617 aa, Artificial Sequence
  Description of Artificial Sequence: Synthetic polypeptide
DASLPYLQKESVFQSGAHAYRIPALLYLPGQQSLLAFAEQRASKKDEHAELIVLRRGDYDAGTHQVQWQAQEVVAQARLDGHRSMNPCPLYDEQTGTLFLFFIAIPGQVTEQQQLQTRANVTRLCYVTSTDHGRTWSSPRDLTDAAIGPAYREWSTFAVGPGHCLQLHDRARSLVVPAYAYRKLHPKQRPIPSAFCFLSHDHGRTWARGHFVAQDTLECQVAEVETGEQRVVTLNARSHLRARVQAQSTNDGLDFQESQLVKKLVEPPPQGCQGSVISFPSPRSGPGSPAQWLLYTHPTHSWQRADLGAYLNPRPPAPEAWSEPVLLAKGSAAYSDLQSMGTGPDGSPLFGCLYEANDYEEIVFLMFTLKQAFPAEYLPQGGGGSGGGGSDKTHTCPPCPAPELLGGPSVFLFPPKPKDTLMISRTPEVTCVVVDVSHEDPEVKFNWYVDGVEVHNAKTKPREEQYNSTYRVVSVLTVLHQDWLNGKEYKCKVSNKALPAPIEKTISKAKGQPREPQVYTLPPSREEMTKNQVSLTCLVKGFYPSDIAVEWESNGQPENNYKTTPPVLDSDGSFFLTSKLTVDKSRWQQGNVFSCSVMHEALHNHYTQKSLSLSPGK

SEQ ID NO: 129 - protein, 8 aa, Artificial Sequence
  Description of Artificial Sequence: Synthetic peptide
GHAFTSDS

SEQ ID NO: 130 - protein, 8 aa, Artificial Sequence
  Description of Artificial Sequence: Synthetic peptide
IYPRSGNP

SEQ ID NO: 131 - protein, 9 aa, Artificial Sequence
  Description of Artificial Sequence: Synthetic peptide
DYYGRYFDV

SEQ ID NO: 132 - protein, 118 aa, Artificial Sequence
  Description of Artificial Sequence: Synthetic polypeptide
EVQLQESGAELARPGASVKLSCKASGHAFTSDSINWVKQRIGQGLEWIGEIYPRSGNPYYNEKFKGKATLTADKSSSTAYMELRSLTSEDSAVYFCATDYYGRYFDVWGTGTTVTVSS

SEQ ID NO: 133 - protein, 6 aa, Artificial Sequence
  Description of Artificial Sequence: Synthetic peptide
EDIYNR

SEQ ID NO: 134 - protein, 3 aa, Artificial Sequence
  Description of Artificial Sequence: Synthetic peptide
GAT

SEQ ID NO: 135 - protein, 9 aa, Artificial Sequence
  Description of Artificial Sequence: Synthetic peptide
QQYWSTPWT

SEQ ID NO: 136 - protein, 107 aa, Artificial Sequence
  Description of Artificial Sequence: Synthetic polypeptide
DIQMTQSSFSFSVSLGDRVTIICKASEDIYNRLAWYQQKPGNTPRLLISGATSLETGVPSRFSGSGSGKDYTLSITSLQTEDVATYYCQQYWSTPWTFGGGTKLEIK

SEQ ID NO: 137 - protein, 8 aa, Artificial Sequence
  Description of Artificial Sequence: Synthetic peptide
GYSFTDYY

SEQ ID NO: 138 - protein, 8 aa, Artificial Sequence
  Description of Artificial Sequence: Synthetic peptide
IYPGSGNT

SEQ ID NO: 139 - protein, 12 aa, Artificial Sequence
  Description of Artificial Sequence: Synthetic peptide
SYYYGSSYLFDY

SEQ ID NO: 140 - protein, 121 aa, Artificial Sequence
  Description of Artificial Sequence: Synthetic polypeptide
EVQLQESGAELVRPGASVKLSCKASGYSFTDYYINWVKQRPGQGLEWIARIYPGSGNTYYNEKFKGKATLTAEKSSITAYMQLSSLTSEDSAVYFCARSYYYGSSYLFDYWGQGTTLTVSS

SEQ ID NO: 141 - protein, 6 aa, Artificial Sequence
  Description of Artificial Sequence: Synthetic peptide
QSIGTS

SEQ ID NO: 142 - protein, 3 aa, Artificial Sequence
  Description of Artificial Sequence: Synthetic peptide
YAS

SEQ ID NO: 143 - protein, 9 aa, Artificial Sequence
  Description of Artificial Sequence: Synthetic peptide
QQSNNWPFT

SEQ ID NO: 144 - protein, 107 aa, Artificial Sequence
  Description of Artificial Sequence: Synthetic polypeptide
DILLTQSPAILSVSPGERVSFSCRASQSIGTSIHWYQQRTNGSPRLLIKYASESISGIPSRFSGSGSGTDFTLSINSVESEDIGDYYCQQSNNWPFTFGSGTKLEIK

SEQ ID NO: 145 - protein, 8 aa, Artificial Sequence
  Description of Artificial Sequence: Synthetic peptide
GYTFTDYY

SEQ ID NO: 146 - protein, 8 aa, Artificial Sequence
  Description of Artificial Sequence: Synthetic peptide
INPNNGYT

SEQ ID NO: 147 - protein, 9 aa, Artificial Sequence
  Description of Artificial Sequence: Synthetic peptide
SAAYYVLDD

SEQ ID NO: 148 - protein, 118 aa, Artificial Sequence
  Description of Artificial Sequence: Synthetic polypeptide
EVQLQQSGPELVKPGALVKISCKASGYTFTDYYMNWVKKSHGRSLEWIGDINPNNGYTNYNQNFKGKATLTVDKSSSTVYMELRSLTSEDSAVYYCARSAAYYVLDDWGQGTSVTVSS

SEQ ID NO: 149 - protein, 11 aa, Artificial Sequence
  Description of Artificial Sequence: Synthetic peptide
KKVTIFGSISV

SEQ ID NO: 150 - protein, 3 aa, Artificial Sequence
  Description of Artificial Sequence: Synthetic peptide
NGA

SEQ ID NO: 151 - protein, 9 aa, Artificial Sequence
  Description of Artificial Sequence: Synthetic peptide
LQNKEVPYT

SEQ ID NO: 152 - protein, 119 aa, Artificial Sequence
  Description of Artificial Sequence: Synthetic polypeptide
DIVMTQSPASLAVSLGQKATISCKASKKVTIFGSISVLHWYQQKPGQPPKLIYNGAKLESGVSARFSDSGSQNRSPFGNQLNFTLTIDPVEADDAATYYCLQNKEVPYTFGGGTELEIK

SEQ ID NO: 153 - protein, 8 aa, Artificial Sequence
  Description of Artificial Sequence: Synthetic peptide
GDSITSGY

SEQ ID NO: 154 - protein, 7 aa, Artificial Sequence
  Description of Artificial Sequence: Synthetic peptide
ISYTGST

SEQ ID NO: 155 - protein, 10 aa, Artificial Sequence
  Description of Artificial Sequence: Synthetic peptide
QGGWLQAMDY

SEQ ID NO: 156 - protein, 118 aa, Artificial Sequence
  Description of Artificial Sequence: Synthetic polypeptide
EVQLQESGPSLVKPSQTLSLTCSVTGDSITSGYWNWIRKFPGNKLEYMGYISYTGSTYYNPSLKRRISITRDTSKNQYYLQLNSVTTEDTATYYCASQGGWLQAMDYWGQGTSVTVSS

SEQ ID NO: 157 - protein, 12 aa, Artificial Sequence
  Description of Artificial Sequence: Synthetic peptide
QSLLYSSNQKNS

SEQ ID NO: 158 - protein, 3 aa, Artificial Sequence
  Description of Artificial Sequence: Synthetic peptide
WAS

SEQ ID NO: 159 - protein, 9 aa, Artificial Sequence
  Description of Artificial Sequence: Synthetic peptide
QQYYGYPWT

SEQ ID NO: 160 - protein, 113 aa, Artificial Sequence
  Description of Artificial Sequence: Synthetic polypeptide
DIVMSQSPSSLAVSVGEKVTMSCKSSQSLLYSSNQKNSLAWYQQKPGQSPKLLIYWASTRESGVPDRFTGSGSGTDFTLTISSVKAEDLAVYYCQQYYGYPWTFGGGTKLEIK

SEQ ID NO: 161 - protein, 8 aa, Mus musculus
GFNIKDTY

SEQ ID NO: 162 - protein, 8 aa, Mus musculus
IDPANDNT

SEQ ID NO: 163 - protein, 11 aa, Mus musculus
EGYGGSYGEGY

SEQ ID NO: 164 - protein, 120 aa, Mus musculus
EVQLQESGAELVKPGASVTLSCTASGFNIKDTYMHWVKQRPEQGLEWIGRIDPANDNTKYDPKFQDKATITADTSSDTAYLRLSSLTSEDTAVYYCAREGYGGSYGEGYWGQGTTLTVSS

SEQ ID NO: 165 - protein, 6 aa, Artificial Sequence
  Description of Artificial Sequence: Synthetic peptide
QSVSND

SEQ ID NO: 166 - protein, 9 aa, Artificial Sequence
  Description of Artificial Sequence: Synthetic peptide
QQDYNSPWT

SEQ ID NO: 167 - protein, 107 aa, Mus musculus
SIVMTQTPKFLLVSAGDRVTITCKASQSVSNDVIWYQQKPGQSPKLLIYYASIRFTGVPDRFAGSGYGTDFTFTINTVQAEDLAVYFCQQDYNSPWTFGGGTKLEIK

SEQ ID NO: 168 - protein, 8 aa, Artificial Sequence
  Description of Artificial Sequence: Synthetic peptide
IDPANGNT

SEQ ID NO: 169 - protein, 14 aa, Artificial Sequence
  Description of Artificial Sequence: Synthetic peptide
PFNYRFYDVYYFDY

SEQ ID NO: 170 - protein, 123 aa, Artificial Sequence
  Description of Artificial Sequence: Synthetic polypeptide
EVQLQESGAELVKPGASVKLSCTASGFNIKDTYMHWVKQRPEQGLEWIGRIDPANGNTKYDPKFPGKATITADTSSNTAYLQLSSLTSEDAAVYYCARPFNYRFYDVYYFDYWGQGTTLTVST

SEQ ID NO: 171 - protein, 5 aa, Artificial Sequence
  Description of Artificial Sequence: Synthetic peptide
SSVSY

SEQ ID NO: 172 - protein, 3 aa, Artificial Sequence
  Description of Artificial Sequence: Synthetic peptide
DTS

SEQ ID NO: 173 - protein, 9 aa, Artificial Sequence
  Description of Artificial Sequence: Synthetic peptide
QQWSTYPLT

SEQ ID NO: 174 - protein, 106 aa, Artificial Sequence
  Description of Artificial Sequence: Synthetic polypeptide
QIVLTQSPAIMSASPGEKVTMTCSASSSVSYMYWYQQKPGSSPRLLIYDTSNLASGVPLRFSGSGSGTSYSLTLSRMEAEDAATYYCQQWSTYPLTFGAGTKLELK

SEQ ID NO: 175 - protein, 8 aa, Artificial Sequence
  Description of Artificial Sequence: Synthetic peptide
GYTFTSYV

SEQ ID NO: 176 - protein, 8 aa, Artificial Sequence
  Description of Artificial Sequence: Synthetic peptide
INPYNDGS

SEQ ID NO: 177 - protein, 5 aa, Artificial Sequence
  Description of Artificial Sequence: Synthetic peptide
QTLDF

SEQ ID NO: 178 - protein, 114 aa, Artificial Sequence
  Description of Artificial Sequence: Synthetic polypeptide
EVQLQESGPELVKPGTSVKMSCKASGYTFTSYVMHWVKQRPGQGLEWIGYINPYNDGSKYNEKFKGKATLTSDTSSSTAYMELSSLTSEDSAVYYCAKQTLDFWGQGTSVTVST

SEQ ID NO: 179 - protein, 10 aa, Artificial Sequence
  Description of Artificial Sequence: Synthetic peptide
ESVEFYGTTL

SEQ ID NO: 180 - protein, 3 aa, Artificial Sequence
  Description of Artificial Sequence: Synthetic peptide
AAS

SEQ ID NO: 181 - protein, 9 aa, Artificial Sequence
  Description of Artificial Sequence: Synthetic peptide
QQSRKVPYT

SEQ ID NO: 182 - protein, 111 aa, Artificial Sequence
  Description of Artificial Sequence: Synthetic polypeptide
DIVLTQSPASLAVSLGQRATISCRASESVEFYGTTLMQWYQQKPGQPPKLLIYAASNVESGVPARFSGSGSGTDFSLNIHPVEEGDIGMYFCQQSRKVPYTFGGGTKLEIK

SEQ ID NO: 183 - protein, 10 aa, Artificial Sequence
  Description of Artificial Sequence: Synthetic peptide
GFSLSTYGLG

SEQ ID NO: 184 - protein, 7 aa, Artificial Sequence
  Description of Artificial Sequence: Synthetic peptide
IWWNDDK

SEQ ID NO: 185 - protein, 13 aa, Artificial Sequence
  Description of Artificial Sequence: Synthetic peptide
TLHYYDGIAWFAY

SEQ ID NO: 186 - protein, 123 aa, Artificial Sequence
  Description of Artificial Sequence: Synthetic polypeptide
QVTLKESGPGILQPSQTLSLTCSFSGFSLSTYGLGVGWIRQPSGKGLEWLANIWWNDDKFYDSVLKSRLTISKDTSNNQVFLKISSVDTSETATYYCAQTLHYYDGIAWFAYWGQGTLVTVSA

SEQ ID NO: 187 - protein, 6 aa, Artificial Sequence
  Description of Artificial Sequence: Synthetic peptide
HYVGTF

SEQ ID NO: 188 - protein, 3 aa, Artificial Sequence
  Description of Artificial Sequence: Synthetic peptide
STS

SEQ ID NO: 189 - protein, 9 aa, Artificial Sequence
  Description of Artificial Sequence: Synthetic peptide
QQYYNSPLT

SEQ ID NO: 190 - protein, 107 aa, Artificial Sequence
  Description of Artificial Sequence: Synthetic polypeptide
DIVMTQSQNFMSTSVGDRVSVTCKASHYVGTFVAWYQQKPGQSPKALIFSTSYRHTGVPDRFTGSGSGTDFTLTISNVQSEDLADYFCQQYYNSPLTFGAGTKLELK

SEQ ID NO: 191 - protein, 8 aa, Artificial Sequence
  Description of Artificial Sequence: Synthetic peptide
GYTFTSNW

SEQ ID NO: 192 - protein, 8 aa, Artificial Sequence
  Description of Artificial Sequence: Synthetic peptide
IHPSDSET

SEQ ID NO: 193 - protein, 9 aa, Artificial Sequence
  Description of Artificial Sequence: Synthetic peptide
SSGDYGRDY

SEQ ID NO: 194 - protein, 118 aa, Artificial Sequence
  Description of Artificial Sequence: Synthetic polypeptide
QVQLQQPGAELVKPGASVKLSCKASGYTFTSNWMNWVKQRPGRGLEWIGRIHPSDSETHYHQKFKSKATLTVDKSSSTAYIQLSSLTSEDSAVYYCAHSSGDYGRDYWGQGTTLTVSS

SEQ ID NO: 195 - protein, 10 aa, Artificial Sequence
  Description of Artificial Sequence: Synthetic peptide
ESVDSYGNSF

SEQ ID NO: 196 - protein, 3 aa, Artificial Sequence
  Description of Artificial Sequence: Synthetic peptide
LAS

SEQ ID NO: 197 - protein, 9 aa, Artificial Sequence
  Description of Artificial Sequence: Synthetic peptide
QQNNEDPWT

SEQ ID NO: 198 - protein, 111 aa, Artificial Sequence
  Description of Artificial Sequence: Synthetic polypeptide
NIVLTQSPASLAVSLGQRATISCRASESVDSYGNSFMHWYQQKPGQPPKLLIYLASNLQSGVPARFSGSGSRTDFTLTIDPVEADDAATYYCQQNNEDPWTFGGGTKLEIK

SEQ ID NO: 199 - protein, 120 aa, Artificial Sequence
  Description of Artificial Sequence: Synthetic polypeptide
EVQLVQSGAEVKKPGATVKISCKVSGFNIKDTYMHWVQQAPGKGLEWMGLIDPANDNTIYAEKFQGRVTITADTSTDTAYMELSSLRSEDTAVYYCAREGYGGSYGEGYWGQGTLVTVSS

SEQ ID NO: 200 - protein, 107 aa, Artificial Sequence
  Description of Artificial Sequence: Synthetic polypeptide
EIVMTQSPPTLSLSPGERVTLSCRASQSVSNDLSWYQQKPGQAPRLLIYYASIRFTGIPARFSGSGSGTDFTLTISSLQPEDFAVYYCQQDYNSPWTFGQGTKVEIK

SEQ ID NO: 201 - protein, 107 aa, Artificial Sequence
  Description of Artificial Sequence: Synthetic polypeptide
EIVMTQSPPTLSLSPGERVTLSCRASQSVSNDLSWYQQKPGQAPRLLIYYASIRFTGIPARFSGSGYGTDFTLTISSLQPEDFAVYYCQQDYNSPWTFGQGTKVEIK

SEQ ID NO: 202 - protein, 107 aa, Artificial Sequence
  Description of Artificial Sequence: Synthetic polypeptide
EIVMTQSPPTLSLSPGERVTLSCRASQSVSNDLSWYQQKPGQAPRLLIYYASIRFTGIPARFSGSGSGTDFTLTISSLQPEDFAVYFCQQDYNSPWTFGQGTKVEIK

SEQ ID NO: 203 - protein, 9 aa, Artificial Sequence
  Description of Artificial Sequence: Synthetic peptide
QQDYTSPWT

SEQ ID NO: 204 - protein, 107 aa, Artificial Sequence
  Description of Artificial Sequence: Synthetic polypeptide
EIVMTQSPPTLSLSPGERVTLSCRASQSVSNDLSWYQQKPGQAPRLLIYYASIRFTGIPARFSGSGSGTDFTLTISSLQPEDFAVYYCQQDYTSPWTFGQGTKVEIK

SEQ ID NO: 205 - protein, 214 aa, Artificial Sequence
  Description of Artificial Sequence: Synthetic polypeptide
EIVMTQSPPTLSLSPGERVTLSCRASQSVSNDLSWYQQKPGQAPRLLIYYASIRFTGIPARFSGSGSGTDFTLTISSLQPEDFAVYYCQQDYTSPWTFGQGTKVEIKRTVAAPSVFIFPPSDEQLKSGTASVVCLLNNFYPREAKVQWKVDNALQSGNSQESVTEQDSKDSTYSLSSTLTLSKADYEKHKVYACEVTHQGLSSPVTKSFNRGEC

SEQ ID NO: 206 - protein, 450 aa, Artificial Sequence
  Description of Artificial Sequence: Synthetic polypeptide
EVQLVQSGAEVKKPGATVKISCKVSGFNIKDTYMHWVQQAPGKGLEWMGLIDPANDNTIYAEKFQGRVTITADTSTDTAYMELSSLRSEDTAVYYCAREGYGGSYGEGYWGQGTLVTVSSASTKGPSVFPLAPSSKSTSGGTAALGCLVKDYFPEPVTVSWNSGALTSGVHTFPAVLQSSGLYSLSSVVTVPSSSLGTQTYICNVNHKPSNTKVDKKVEPKSCDKTHTCPPCPAPELLGGPSVFLFPPKPKDTLMISRTPEVTCVVVDVSHEDPEVKFNWYVDGVEVHNAKTKPREEQYASTYRVVSVLTVLHQDWLNGKEYKCKVSNKALPAPIEKTISKAKGQPREPQVYTLPPSREEMTKNQVSLYCLVKGFYPSDIAVEWESNGQPENNYKTTPPVLDSDGSFFLYSKLTVDKSRWQQGNVFSCSVMHEALHNHYTQKSLSLSPGK

SEQ ID NO: 207 - protein, 612 aa, Artificial Sequence
  Description of Artificial Sequence: Synthetic polypeptide
DASLPYLQKESVFQSGAHAYRIPALLYLPGQQSLLAFAEQRASKKDEHAELIVLRRGDYDAGTHQVQWQAQEVVAQARLDGHRSMNPCPLYDEQTGTLFLFFIAIPGQVTEQQQLQTRANVTRLCQVTSTDHGRTWSSPRDLTDAAIGPAYREWSTFAVGPGHCLQLHDRARSLVVPAYAYRKLHPKQRPIPSAFCFLSHDHGRTWARGHFVAQDTLECQVAEVETGEQRVVTLNARSHLRARVQAQSTNDGLDFQESQLVKKLVEPPPQGCQGSVISFPSPRSGPGSPAQWLLYTHPTHSWQRADLGAYLNPRPPAPEAWSEPVLLAKGSAAYSDLQSMGTGPDGSPLFGCLYEANDYEEIVFLMFTLKQAFPAEYLPQEPKSSDKTHTCPPCPAPELLGGPSVFLFPPKPKDTLMISRTPEVTCVVVDVSHEDPEVKFNWYVDGVEVHNAKTKPREEQYASTYRVVSVLTVLHQDWLNGKEYKCKVSNKALPAPIEKTISKAKGQPREPQVYTLPPSREEMTKNQVSLTCLVKGFYPSDIAVEWESNGQPENNYKTTPPVLDSDGSFFLTSKLTVDKSRWQQGNVFSCSVMHEALHNHYTQKSLSLSPGK

SEQ ID NO: 208 - DNA, 642 bp, Artificial Sequence
  Description of Artificial Sequence: Synthetic polynucleotide
gaaattgtgatgacacagagccctccaacgctgagcctgtctcctggcgaaagagtgaccctgagctgtagagccagccagagcgtgtccaacgacctgagctggtatcagcagaagcctggacaggcccctcggctgctgatctactacgccagcatcagattcacaggcatccccgccagattttccggcagcggctctggcacagatttcaccctgaccataagcagcctgcagcctgaggacttcgccgtgtactactgtcagcaggactacactagcccctggacctttggccagggcaccaaggtggaaatcaagcgtacggtggctgcaccatctgtcttcatcttcccgccatctgatgagcagttgaaatctggaactgcctctgttgtgtgcctgctgaataacttctatcccagagaggccaaagtacagtggaaggtggataacgccctccaatcgggtaactcccaggagagtgtcacagagcaggacagcaaggacagcacctacagcctcagcagcaccctgacgctgagcaaagcagactacgagaaacacaaagtctacgcctgcgaagtcacccatcagggcctgagctcgcccgtcacaaagagcttcaacaggggagagtgt

SEQ ID NO: 209 - DNA, 1350 bp, Artificial Sequence
  Description of Artificial Sequence: Synthetic polynucleotide
gaggtgcagctggttcagtctggcgccgaagtgaaaaagcctggcgccaccgtgaagatcagctgcaaggtgtccggcttcaacatcaaggacacctacatgcactgggtgcagcaggcccctggcaaaggacttgaatggatgggcctgatcgaccccgccaacgacaataccatctacgccgagaagttccagggcagagtgaccatcaccgccgacacctctaccgacaccgcctacatggaactgagcagcctgagaagcgaggacaccgccgtgtactactgtgccagagaaggctacggcggcagctacggcgaaggatattggggacagggcaccctggtcaccgttagctctgctagcaccaagggcccatccgtcttccccctggcaccctcctccaagagcacctctgggggcacagcggccctgggctgcctggtcaaggactacttccccgaaccggtgacggtgtcctggaactcaggcgctctgaccagcggcgtgcacaccttcccggctgtcctacagtcctcaggactctactccctcagcagcgtggtgaccgtgccctccagcagcttgggcacccagacctacatctgcaacgtgaatcacaagcccagcaacaccaaggtggacaagaaagttgagcccaaatcttgtgacaaaactcacacatgcccaccgtgcccagcacctgaactcctggggggaccgtcagtcttcctcttccccccaaaacccaaggacaccctcatgatctcccggacccctgaggtcacatgcgtggtggtggacgtgagccacgaagaccctgaggtcaagttcaactggtacgtggacggcgtggaggtgcataatgccaagacaaagccgcgggaggagcagtacgccagcacgtaccgtgtggtcagcgtcctcaccgtcctgcaccaggactggctgaatggcaaggagtacaagtgcaaggtctccaacaaagccctcccagcccccatcgagaaaaccatctccaaagccaaagggcagccccgagaaccacaggtctacaccctgcccccatcccgggaggagatgaccaagaaccaggtcagcctgtactgcctggtcaaaggcttctatcccagcgacatcgccgtggagtgggagagcaatgggcagccggagaacaactacaagaccacgcctcccgtgctggactccgacggctccttcttcctctatagcaagctcaccgtggacaagagcaggtggcagcaggggaacgtcttctcatgctccgtgatgcatgaggctctgcacaaccactacacgcagaagagcctaagcttgtctccgggtaaa

SEQ ID NO: 210 - DNA, 1836 bp, Artificial Sequence
  Description of Artificial Sequence: Synthetic polynucleotide
gatgcatctctgccttacctgcagaaagaaagcgtgttccagtctggcgcccacgcctacagaattcccgctctgctgtatctgccaggccagcagtctctgctggctttcgctgaacagcgggccagcaagaaggatgagcacgccgaactgatcgtgctgcggagaggcgattacgacgccggcacacatcaggtgcagtggcaggctcaagaggtggtggctcaggctagactggacggccacagatctatgaacccctgtcctctgtacgatgaacagaccggcacactgtttctgttctttatcgctatccccggccaagtgaccgagcagcagcagctgcagacaagagccaacgtgaccagactgtgtcaagtgacctccaccgaccacggcagaacctggtctagccctagagatctgaccgacgccgccatcggacctgcctatagagagtggtccaccttcgccgttggacctggacactgtctccagctgcacgacagggctagatctctggtggtgcctgcctacgcctatagaaagctgcaccccaaacagcggcctattcctagcgccttctgctttctgagccacgatcacggcaggacatgggccagaggacatttcgtggcccaggacacactggaatgccaggtggccgaagtggaaaccggcgagcagagagtcgtgaccctgaacgccagatctcacctgagagccagagtgcaggcccagagcacaaacgacggcctggatttccaagagagccagctggtcaagaaactggtggaacctcctccacagggctgtcagggaagcgtgatcagctttccatctcctagaagcggccctggctctcctgctcagtggctgctgtatacacaccccacacacagctggcagagagccgatctgggcgcctacctgaatcctagacctcctgctcctgaggcttggagcgaacctgttctgctggccaagggcagcgctgcctacagcgatctgcagtctatgggcacaggccctgatggcagccctctgtttggctgtctgtacgaggccaacgactacgaagagatcgtgttcctgatgttcaccctgaagcaggcctttccagccgagtacctgcctcaagagcccaaatcttctgacaaaactcacacatgcccaccgtgcccagcacctgaactcctggggggaccgtcagtcttcctcttccccccaaaacccaaggacaccctcatgatctcccggacccctgaggtcacatgcgtggtggtggacgtgagccacgaagaccctgaggtcaagttcaactggtacgtggacggcgtggaggtgcataatgccaagacaaagccgcgggaggagcagtacgccagcacgtaccgtgtggtcagcgtcctcaccgtcctgcaccaggactggctgaatggcaaggagtacaagtgcaaggtctccaacaaagccctcccagcccccatcgagaaaaccatctccaaagccaaagggcagccccgagaaccacaggtctacaccctgcccccatcccgggaggagatgaccaagaaccaggtcagcctgacctgcctggtcaaaggcttctatcccagcgacatcgccgtggagtgggagagcaatgggcagccggagaacaactacaagaccacgcctcccgtgctggactccgacggctccttcttcctcaccagcaagctcaccgtggacaagagcaggtggcagcaggggaacgtcttctcatgctccgtgatgcatgaggctctgcacaaccactacacgcagaagagcctctccctgtctccgggtaaa

SEQ ID NO: 211 - protein, 612 aa, Artificial Sequence
  Description of Artificial Sequence: Synthetic polypeptide
DASLPYLQKESVFQSGAHAYRIPALLYLPGQQSLLAFAEQRASKKDEHAELIVLRRGDYDAGTHQVQWQAQEVVAQARLDGHRSMNPCPLYDEQTGTLFLFFIAIPGQVTEQQQLQTRANVTRLCYVTSTDHGRTWSSPRDLTDAAIGPAYREWSTFAVGPGHCLQLHDRARSLVVPAYAYRKLHPKQRPIPSAFCFLSHDHGRTWARGHFVAQDTLECQVAEVETGEQRVVTLNARSHLRFRVQAQSTNDGLDFQESQLVKKLVEPPPTGCQGSVISFPSPRSGPGSPAQWLLYTHPTHSWQRADLGAYLNPRPPAPEAWSEPVLLAKGSAAYSDLQSMGTGPDGSPLFGCLYEANDYEEIVFLMFTLKQAFPAEYLPQEPKSSDKTHTCPPCPAPELLGGPSVFLFPPKPKDTLMISRTPEVTCVVVDVSHEDPEVKFNWYVDGVEVHNAKTKPREEQYASTYRVVSVLTVLHQDWLNGKEYKCKVSNKALPAPIEKTISKAKGQPREPQVYTLPPSREEMTKNQVSLTCLVKGFYPSDIAVEWESNGQPENNYKTTPPVLDSDGSFFLTSKLTVDKSRWQQGNVFSCSVMHEALHNHYTQKSLSLSPGK

SEQ ID NO: 212 - DNA, 1836 bp, Artificial Sequence
  Description of Artificial Sequence: Synthetic polynucleotide
gatgcatctctgccttacctgcagaaagaaagcgtgttccagtctggcgcccacgcctacagaattcccgctctgctgtatctgccaggccagcagtctctgctggctttcgctgaacagcgggccagcaagaaggatgagcacgccgaactgatcgtgctgcggagaggcgattacgacgccggcacacatcaggtgcagtggcaggctcaagaggtggtggctcaggctagactggacggccacagatctatgaacccctgtcctctgtacgatgaacagaccggcacactgtttctgttctttatcgctatccccggccaagtgaccgagcagcagcagctgcagacaagagccaacgtgaccagactgtgttacgtgacctccaccgaccacggcagaacctggtctagccctagagatctgaccgacgccgccatcggacctgcctatagagagtggtccaccttcgccgttggacctggacactgtctccagctgcacgacagggctagatctctggtggtgcctgcctacgcctatagaaagctgcaccccaaacagcggcctattcctagcgccttctgctttctgagccacgatcacggcaggacatgggccagaggacatttcgtggcccaggacacactggaatgccaggtggccgaagtggaaaccggcgagcagagagtcgtgaccctgaacgccagatctcacctgagattcagagtgcaggcccagagcacaaacgacggcctggatttccaagagagccagctggtcaagaaactggtggaacctcctccaaccggctgtcagggaagcgtgatcagctttccatctcctagaagcggccctggctctcctgctcagtggctgctgtatacacaccccacacacagctggcagagagccgatctgggcgcctacctgaatcctagacctcctgctcctgaggcttggagcgaacctgttctgctggccaagggcagcgctgcctacagcgatctgcagtctatgggcacaggccctgatggcagccctctgtttggctgtctgtacgaggccaacgactacgaagagatcgtgttcctgatgttcaccctgaagcaggcctttccagccgagtacctgcctcaagagcccaaatcttctgacaaaactcacacatgcccaccgtgcccagcacctgaactcctggggggaccgtcagtcttcctcttccccccaaaacccaaggacaccctcatgatctcccggacccctgaggtcacatgcgtggtggtggacgtgagccacgaagaccctgaggtcaagttcaactggtacgtggacggcgtggaggtgcataatgccaagacaaagccgcgggaggagcagtacgccagcacgtaccgtgtggtcagcgtcctcaccgtcctgcaccaggactggctgaatggcaaggagtacaagtgcaaggtctccaacaaagccctcccagcccccatcgagaaaaccatctccaaagccaaagggcagccccgagaaccacaggtctacaccctgcccccatcccgggaggagatgaccaagaaccaggtcagcctgacctgcctggtcaaaggcttctatcccagcgacatcgccgtggagtgggagagcaatgggcagccggagaacaactacaagaccacgcctcccgtgctggactccgacggctccttcttcctcaccagcaagctcaccgtggacaagagcaggtggcagcaggggaacgtcttctcatgctccgtgatgcatgaggctctgcacaaccactacacgcagaagagcctctccctgtctccgggtaaa

SEQ ID NO: 213 - protein, 450 aa, Artificial Sequence
  Description of Artificial Sequence: Synthetic polypeptide
EVQLVQSGAEVKKPGATVKISCKVSGFNIKDTYMHWVQQAPGKGLEWMGLIDPANDNTIYAEKFQGRVTITADTSTDTAYMELSSLRSEDTAVYYCAREGYGGSYGEGYWGQGTLVTVSSASTKGPSVFPLAPSSKSTSGGTAALGCLVKDYFPEPVTVSWNSGALTSGVHTFPAVLQSSGLYSLSSVVTVPSSSLGTQTYICNVNHKPSNTKVDKKVEPKSCDKTHTCPPCPAPELLGGPSVFLFPPKPKDTLMISRTPEVTCVVVDVSHEDPEVKFNWYVDGVEVHNAKTKPREEQYASTYRVVSVLTVLHQDWLNGKEYKCKVSNKALPAPIEKTISKAKGQPREPQVYTLPPSREEMTKNQVSLTCLVKGFYPSDIAVEWESNGQPENNYKTTPPVLDSDGSFFLTSKLTVDKSRWQQGNVFSCSVMHEALHNHYTQKSLSLSPGK

SEQ ID NO: 214 - protein, 612 aa, Artificial Sequence
  Description of Artificial Sequence: Synthetic polypeptide
DASLPYLQKESVFQSGAHAYRIPALLYLPGQQSLLAFAEQRASKKDEHAELIVLRRGDYDAGTHQVQWQAQEVVAQARLDGHRSMNPCPLYDEQTGTLFLFFIAIPGQVTEQQQLQTRANVTRLCYVTSTDHGRTWSSPRDLTDAAIGPAYREWSTFAVGPGHCLQLHDRARSLVVPAYAYRKLHPKQRPIPSAFCFLSHDHGRTWARGHFVAQDTLECQVAEVETGEQRVVTLNARSHLRFRVQAQSTNDGLDFQESQLVKKLVEPPPTGCQGSVISFPSPRSGPGSPAQWLLYTHPTHSWQRADLGAYLNPRPPAPEAWSEPVLLAKGSAAYSDLQSMGTGPDGSPLFGCLYEANDYEEIVFLMFTLKQAFPAEYLPQEPKSSDKTHTCPPCPAPELLGGPSVFLFPPKPKDTLMISRTPEVTCVVVDVSHEDPEVKFNWYVDGVEVHNAKTKPREEQYASTYRVVSVLTVLHQDWLNGKEYKCKVSNKALPAPIEKTISKAKGQPREPQVYTLPPSREEMTKNQVSLYCLVKGFYPSDIAVEWESNGQPENNYKTTPPVLDSDGSFFLYSKLTVDKSRWQQGNVFSCSVMHEALHNHYTQKSLSLSPGK

SEQ ID NO: 215 - DNA, 1350 bp, Artificial Sequence
  Description of Artificial Sequence: Synthetic polynucleotide
gaggtgcagctggttcagtctggcgccgaagtgaaaaagcctggcgccaccgtgaagatcagctgcaaggtgtccggcttcaacatcaaggacacctacatgcactgggtgcagcaggcccctggcaaaggacttgaatggatgggcctgatcgaccccgccaacgacaataccatctacgccgagaagttccagggcagagtgaccatcaccgccgacacctctaccgacaccgcctacatggaactgagcagcctgagaagcgaggacaccgccgtgtactactgtgccagagaaggctacggcggcagctacggcgaaggatattggggacagggcaccctggtcaccgttagctctgctagcaccaagggcccatccgtcttccccctggcaccctcctccaagagcacctctgggggcacagcggccctgggctgcctggtcaaggactacttccccgaaccggtgacggtgtcctggaactcaggcgctctgaccagcggcgtgcacaccttcccggctgtcctacagtcctcaggactctactccctcagcagcgtggtgaccgtgccctccagcagcttgggcacccagacctacatctgcaacgtgaatcacaagcccagcaacaccaaggtggacaagaaagttgagcccaaatcttgtgacaaaactcacacatgcccaccgtgcccagcacctgaactcctggggggaccgtcagtcttcctcttccccccaaaacccaaggacaccctcatgatctcccggacccctgaggtcacatgcgtggtggtggacgtgagccacgaagaccctgaggtcaagttcaactggtacgtggacggcgtggaggtgcataatgccaagacaaagccgcgggaggagcagtacgccagcacgtaccgtgtggtcagcgtcctcaccgtcctgcaccaggactggctgaatggcaaggagtacaagtgcaaggtctccaacaaagccctcccagcccccatcgagaaaaccatctccaaagccaaagggcagccccgagaaccacaggtctacaccctgcccccatcccgggaggagatgaccaagaaccaggtcagcctgacctgcctggtcaaaggcttctatcccagcgacatcgccgtggagtgggagagcaatgggcagccggagaacaactacaagaccacgcctcccgtgctggactccgacggctccttcttcctcaccagcaagctcaccgtggacaagagcaggtggcagcaggggaacgtcttctcatgctccgtgatgcatgaggctctgcacaaccactacacgcagaagagcctctccctgtctccgggtaaa

SEQ ID NO: 216 - DNA, 1836 bp, Artificial Sequence
  Description of Artificial Sequence: Synthetic polynucleotide
gatgcatctctgccttacctgcagaaagaaagcgtgttccagtctggcgcccacgcctacagaattcccgctctgctgtatctgccaggccagcagtctctgctggctttcgctgaacagcgggccagcaagaaggatgagcacgccgaactgatcgtgctgcggagaggcgattacgacgccggcacacatcaggtgcagtggcaggctcaagaggtggtggctcaggctagactggacggccacagatctatgaacccctgtcctctgtacgatgaacagaccggcacactgtttctgttctttatcgctatccccggccaagtgaccgagcagcagcagctgcagacaagagccaacgtgaccagactgtgttacgtgacctccaccgaccacggcagaacctggtctagccctagagatctgaccgacgccgccatcggacctgcctatagagagtggtccaccttcgccgttggacctggacactgtctccagctgcacgacagggctagatctctggtggtgcctgcctacgcctatagaaagctgcaccccaaacagcggcctattcctagcgccttctgctttctgagccacgatcacggcaggacatgggccagaggacatttcgtggcccaggacacactggaatgccaggtggccgaagtggaaaccggcgagcagagagtcgtgaccctgaacgccagatctcacctgagattcagagtgcaggcccagagcacaaacgacggcctggatttccaagagagccagctggtcaagaaactggtggaacctcctccaaccggctgtcagggaagcgtgatcagctttccatctcctagaagcggccctggctctcctgctcagtggctgctgtatacacaccccacacacagctggcagagagccgatctgggcgcctacctgaatcctagacctcctgctcctgaggcttggagcgaacctgttctgctggccaagggcagcgctgcctacagcgatctgcagtctatgggcacaggccctgatggcagccctctgtttggctgtctgtacgaggccaacgactacgaagagatcgtgttcctgatgttcaccctgaagcaggcctttccagccgagtacctgcctcaagagcccaaatcttctgacaaaactcacacatgcccaccgtgcccagcacctgaactcctggggggaccgtcagtcttcctcttccccccaaaacccaaggacaccctcatgatctcccggacccctgaggtcacatgcgtggtggtggacgtgagccacgaagaccctgaggtcaagttcaactggtacgtggacggcgtggaggtgcataatgccaagacaaagccgcgggaggagcagtacgccagcacgtaccgtgtggtcagcgtcctcaccgtcctgcaccaggactggctgaatggcaaggagtacaagtgcaaggtctccaacaaagccctcccagcccccatcgagaaaaccatctccaaagccaaagggcagccccgagaaccacaggtctacaccctgcccccatcccgggaggagatgaccaagaaccaggtcagcctgtactgcctggtcaaaggcttctatcccagcgacatcgccgtggagtgggagagcaatgggcagccggagaacaactacaagaccacgcctcccgtgctggactccgacggctccttcttcctctatagcaagctcaccgtggacaagagcaggtggcagcaggggaacgtcttctcatgctccgtgatgcatgaggctctgcacaaccactacacgcagaagagcctaagcttgtctccgggtaaa

SEQ ID NO: 217 - protein, 612 aa, Artificial Sequence
  Description of Artificial Sequence: Synthetic polypeptide
DASLPYLQDESVFQSGAHAYRIPALLYLPGQQSLLAFAEQRASKKDEHAELIVLRRGDYDAPTHQVQWQAQEVVAQARLDGHRSMNPCPLYDEQTGTLFLFFIAIPGQVTEQQQLQTRANVTRLCQVTSTDHGRTWSSPRDLTDAAIGPAYREWSTFAVGPGHCLQLHDRARSLVVPAYAYRKLHPKQRPIPSAFCFLSHDHGRTWARGHFVAQDTLANQVAEVETGEQRVVTLNARSHLRARVQAQSTNDGLDFQESQLVKKLVEPPPQGCQGSVISFPSPRSGPGSPAQWLLYTHPTHSWQRADLGAYLNPRPPAPEAWSEPVLLAKGSAAYSDLQSMGTGPDGSPLFGCLYEANDYEEIRFRMFTLKQAFPAEYLPQEPKSSDKTHTCPPCPAPELLGGPSVFLFPPKPKDTLMISRTPEVTCVVVDVSHEDPEVKFNWYVDGVEVHNAKTKPREEQYASTYRVVSVLTVLHQDWLNGKEYKCKVSNKALPAPIEKTISKAKGQPREPQVYTLPPSREEMTKNQVSLYCLVKGFYPSDIAVEWESNGQPENNYKTTPPVLDSDGSFFLYSKLTVDKSRWQQGNVFSCSVMHEALHNHYTQKSLSLSPGK

SEQ ID NO: 218 - DNA, 1836 bp, Artificial Sequence
  Description of Artificial Sequence: Synthetic polynucleotide
gatgcatctctgccttacctgcaggatgaaagcgtgttccagtctggcgcccacgcctacagaattcccgctctgctgtatctgccaggccagcagtctctgctggctttcgctgaacagcgggccagcaagaaggatgagcacgccgaactgatcgtgctgcggagaggcgattacgacgcccctacacatcaggtgcagtggcaggctcaagaggtggtggctcaggctagactggacggccacagatctatgaacccctgtcctctgtacgatgaacagaccggcacactgtttctgttctttatcgctatccccggccaagtgaccgagcagcagcagctgcagacaagagccaacgtgaccagactgtgtcaagtgacctccaccgaccacggcagaacctggtctagccctagagatctgaccgacgccgccatcggacctgcctatagagagtggtccaccttcgccgttggacctggacactgtctccagctgcacgacagggctagatctctggtggtgcctgcctacgcctatagaaagctgcaccccaaacagcggcctattcctagcgccttctgctttctgagccacgatcacggcaggacatgggccagaggacatttcgtggcccaggacacactggcgaatcaggtggccgaagtggaaaccggcgagcagagagtcgtgaccctgaacgccagatctcacctgagagccagagtgcaggcccagagcacaaacgacggcctggatttccaagagagccagctggtcaagaaactggtggaacctcctccacagggctgtcagggaagcgtgatcagctttccatctcctagaagcggccctggctctcctgctcagtggctgctgtatacacaccccacacacagctggcagagagccgatctgggcgcctacctgaatcctagacctcctgctcctgaggcttggagcgaacctgttctgctggccaagggcagcgctgcctacagcgatctgcagtctatgggcacaggccctgatggcagccctctgtttggctgtctgtacgaggccaacgactacgaagagatccgtttccgtatgttcaccctgaagcaggcctttccagccgagtacctgcctcaagagcccaaatcttctgacaaaactcacacatgcccaccgtgcccagcacctgaactcctggggggaccgtcagtcttcctcttccccccaaaacccaaggacaccctcatgatctcccggacccctgaggtcacatgcgtggtggtggacgtgagccacgaagaccctgaggtcaagttcaactggtacgtggacggcgtggaggtgcataatgccaagacaaagccgcgggaggagcagtacgccagcacgtaccgtgtggtcagcgtcctcaccgtcctgcaccaggactggctgaatggcaaggagtacaagtgcaaggtctccaacaaagccctcccagcccccatcgagaaaaccatctccaaagccaaagggcagccccgagaaccacaggtctacaccctgcccccatcccgggaggagatgaccaagaaccaggtcagcctgtactgcctggtcaaaggcttctatcccagcgacatcgccgtggagtgggagagcaatgggcagccggagaacaactacaagaccacgcctcccgtgctggactccgacggctccttcttcctctatagcaagctcaccgtggacaagagcaggtggcagcaggggaacgtcttctcatgctccgtgatgcatgaggctctgcacaaccactacacgcagaagagcctaagcttgtctccgggtaaa

SEQ ID NO: 219 - protein, 612 aa, Artificial Sequence
  Description of Artificial Sequence: Synthetic polypeptide
DASLPYLQKESVFQSGAHAYRIPALLYLPGQQSLLAFAEQRRSKKDEHAELIVLRRGDYDAGTHQVQWQAQEVVAQARLDGHRSMNPCPLYDEQTGTLFLFFIAIPGQVTEQQQLQTRANVTRLCYVTSTDHGRTWSSPRDLTDAAIGPAYREWSTFAVGPGHCLQLHDRARSLVVPAYAYRKLHPKQRPIPSAFCFLSHDHGRTWARGHFVAQDTLECQVAEVETGEQRVVTLNARSHLRFRVQAQSTNDGLDFQESQLVKKLVEPPPTGCQGSVISFPSPRSGPGSPAQWLLYTHPTHSWQRADLGAYLNPRPPAPEAWSEPVLLAKGSAAYSDLQSMGTGPDGSPLFGCLYEANDYEEIVFLMFTLKQAFPAEYLPQEPKSSDKTHTCPPCPAPELLGGPSVFLFPPKPKDTLMISRTPEVTCVVVDVSHEDPEVKFNWYVDGVEVHNAKTKPREEQYASTYRVVSVLTVLHQDWLNGKEYKCKVSNKALPAPIEKTISKAKGQPREPQVYTLPPSREEMTKNQVSLYCLVKGFYPSDIAVEWESNGQPENNYKTTPPVLDSDGSFFLYSKLTVDKSRWQQGNVFSCSVMHEALHNHYTQKSLSLSPGK

SEQ ID NO: 220 - DNA, 1836 bp, Artificial Sequence
  Description of Artificial Sequence: Synthetic polynucleotide
gatgcatctctgccttacctgcagaaagaaagcgtgttccagtctggcgcccacgcctacagaattcccgctctgctgtatctgccaggccagcagtctctgctggctttcgctgaacagcggcggagcaagaaggatgagcacgccgaactgatcgtgctgcggagaggcgattacgacgccggcacacatcaggtgcagtggcaggctcaagaggtggtggctcaggctagactggacggccacagatctatgaacccctgtcctctgtacgatgaacagaccggcacactgtttctgttctttatcgctatccccggccaagtgaccgagcagcagcagctgcagacaagagccaacgtgaccagactgtgttacgtgacctccaccgaccacggcagaacctggtctagccctagagatctgaccgacgccgccatcggacctgcctatagagagtggtccaccttcgccgttggacctggacactgtctccagctgcacgacagggctagatctctggtggtgcctgcctacgcctatagaaagctgcaccccaaacagcggcctattcctagcgccttctgctttctgagccacgatcacggcaggacatgggccagaggacatttcgtggcccaggacacactggaatgccaggtggccgaagtggaaaccggcgagcagagagtcgtgaccctgaacgccagatctcacctgagattcagagtgcaggcccagagcacaaacgacggcctggatttccaagagagccagctggtcaagaaactggtggaacctcctccaaccggctgtcagggaagcgtgatcagctttccatctcctagaagcggccctggctctcctgctcagtggctgctgtatacacaccccacacacagctggcagagagccgatctgggcgcctacctgaatcctagacctcctgctcctgaggcttggagcgaacctgttctgctggccaagggcagcgctgcctacagcgatctgcagtctatgggcacaggccctgatggcagccctctgtttggctgtctgtacgaggccaacgactacgaagagatcgtgttcctgatgttcaccctgaagcaggcctttccagccgagtacctgcctcaagagcccaaatcttctgacaaaactcacacatgcccaccgtgcccagcacctgaactcctggggggaccgtcagtcttcctcttccccccaaaacccaaggacaccctcatgatctcccggacccctgaggtcacatgcgtggtggtggacgtgagccacgaagaccctgaggtcaagttcaactggtacgtggacggcgtggaggtgcataatgccaagacaaagccgcgggaggagcagtacgccagcacgtaccgtgtggtcagcgtcctcaccgtcctgcaccaggactggctgaatggcaaggagtacaagtgcaaggtctccaacaaagccctcccagcccccatcgagaaaaccatctccaaagccaaagggcagccccgagaaccacaggtctacaccctgcccccatcccgggaggagatgaccaagaaccaggtcagcctgtactgcctggtcaaaggcttctatcccagcgacatcgccgtggagtgggagagcaatgggcagccggagaacaactacaagaccacgcctcccgtgctggactccgacggctccttcttcctctatagcaagctcaccgtggacaagagcaggtggcagcaggggaacgtcttctcatgctccgtgatgcatgaggctctgcacaaccactacacgcagaagagcctaagcttgtctccgggtaaa

SEQ ID NO: 221 - protein, 330 aa, Homo sapiens
ASTKGPSVFPLAPSSKSTSGGTAALGCLVKDYFPEPVTVSWNSGALTSGVHTFPAVLQSSGLYSLSSVVTVPSSSLGTQTYICNVNHKPSNTKVDKKVEPKSCDKTHTCPPCPAPELLGGPSVFLFPPKPKDTLMISRTPEVTCVVVDVSHEDPEVKFNWYVDGVEVHNAKTKPREEQYNSTYRVVSVLTVLHQDWLNGKEYKCKVSNKALPAPIEKTISKAKGQPREPQVYTLPPSREEMTKNQVSLTCLVKGFYPSDIAVEWESNGQPENNYKTTPPVLDSDGSFFLYSKLTVDKSRWQQGNVFSCSVMHEALHNHYTQKSLSLSPGK

SEQ ID NO: 222 - protein, 330 aa, Homo sapiens
ASTKGPSVFPLAPSSKSTSGGTAALGCLVKDYFPEPVTVSWNSGALTSGVHTFPAVLQSSGLYSLSSVVTVPSSSLGTQTYICNVNHKPSNTKVDKKVEPKSCDKTHTCPPCPAPELLGGPSVFLFPPKPKDTLMISRTPEVTCVVVDVSHEDPEVKFNWYVDGVEVHNAKTKPREEQYASTYRVVSVLTVLHQDWLNGKEYKCKVSNKALPAPIEKTISKAKGQPREPQVYTLPPSREEMTKNQVSLTCLVKGFYPSDIAVEWESNGQPENNYKTTPPVLDSDGSFFLYSKLTVDKSRWQQGNVFSCSVMHEALHNHYTQKSLSLSPGK

SEQ ID NO: 223 - protein, 330 aa, Homo sapiens
ASTKGPSVFPLAPSSKSTSGGTAALGCLVKDYFPEPVTVSWNSGALTSGVHTFPAVLQSSGLYSLSSVVTVPSSSLGTQTYICNVNHKPSNTKVDKKVEPKSCDKTHTCPPCPAPELLGGPSVFLFPPKPKDTLMISRTPEVTCVVVDVSHEDPEVKFNWYVDGVEVHNAKTKPREEQYNSTYRVVSVLTVLHQDWLNGKEYKCKVSNKALPAPIEKTISKAKGQPREPQVYTLPPSREEMTKNQVSLTCLVKGFYPSDIAVEWESNGQPENNYKTTPPVLDSDGSFFLTSKLTVDKSRWQQGNVFSCSVMHEALHNHYTQKSLSLSPGK

SEQ ID NO: 224 - protein, 330 aa, Homo sapiens
ASTKGPSVFPLAPSSKSTSGGTAALGCLVKDYFPEPVTVSWNSGALTSGVHTFPAVLQSSGLYSLSSVVTVPSSSLGTQTYICNVNHKPSNTKVDKKVEPKSCDKTHTCPPCPAPELLGGPSVFLFPPKPKDTLMISRTPEVTCVVVDVSHEDPEVKFNWYVDGVEVHNAKTKPREEQYNSTYRVVSVLTVLHQDWLNGKEYKCKVSNKALPAPIEKTISKAKGQPREPQVYTLPPSREEMTKNQVSLYCLVKGFYPSDIAVEWESNGQPENNYKTTPPVLDSDGSFFLYSKLTVDKSRWQQGNVFSCSVMHEALHNHYTQKSLSLSPGK

SEQ ID NO: 225 - protein, 330 aa, Homo sapiens
ASTKGPSVFPLAPSSKSTSGGTAALGCLVKDYFPEPVTVSWNSGALTSGVHTFPAVLQSSGLYSLSSVVTVPSSSLGTQTYICNVNHKPSNTKVDKKVEPKSCDKTHTCPPCPAPELLGGPSVFLFPPKPKDTLMISRTPEVTCVVVDVSHEDPEVKFNWYVDGVEVHNAKTKPREEQYASTYRVVSVLTVLHQDWLNGKEYKCKVSNKALPAPIEKTISKAKGQPREPQVYTLPPSREEMTKNQVSLTCLVKGFYPSDIAVEWESNGQPENNYKTTPPVLDSDGSFFLTSKLTVDKSRWQQGNVFSCSVMHEALHNHYTQKSLSLSPGK

SEQ ID NO: 226 - protein, 330 aa, Homo sapiens
ASTKGPSVFPLAPSSKSTSGGTAALGCLVKDYFPEPVTVSWNSGALTSGVHTFPAVLQSSGLYSLSSVVTVPSSSLGTQTYICNVNHKPSNTKVDKKVEPKSCDKTHTCPPCPAPELLGGPSVFLFPPKPKDTLMISRTPEVTCVVVDVSHEDPEVKFNWYVDGVEVHNAKTKPREEQYASTYRVVSVLTVLHQDWLNGKEYKCKVSNKALPAPIEKTISKAKGQPREPQVYTLPPSREEMTKNQVSLYCLVKGFYPSDIAVEWESNGQPENNYKTTPPVLDSDGSFFLYSKLTVDKSRWQQGNVFSCSVMHEALHNHYTQKSLSLSPGK

SEQ ID NO: 227 - protein, 330 aa, Homo sapiens [sequence omitted]

SEQ ID NO: 228 - protein, 326 aa, Homo sapiens
ASTKGPSVFPLAPCSRSTSESTAALGCLVKDYFPEPVTVSWNSGALTSGVHTFPAVLQSSGLYSLSSVVTVPSSNFGTQTYTCNVDHKPSNTKVDKTVERKCCVECPPCPAPPVAGPSVFLFPPKPKDTLMISRTPEVTCVVVDVSHEDPEVQFNWYVDGVEVHNAKTKPREEQFNSTFRVVSVLTVVHQDWLNGKEYKCKVSNKGLPAPIEKTISKTKGQPREPQVYTLPPSREEMTKNQVSLTCLVKGFYPSDISVEWESNGQPENNYKTTPPMLDSDGSFFLYSKLTVDKSRWQQGNVFSCSVMHEALHNHYTQKSLSLSPGK

SEQ ID NO: 229 - protein, 377 aa, Homo sapiens
ASTKGPSVFPLAPCSRSTSGGTAALGCLVKDYFPEPVTVSWNSGALTSGVHTFPAVLQSSGLYSLSSVVTVPSSSLGTQTYTCNVNHKPSNTKVDKRVELKTPLGDTTHTCPRCPEPKSCDTPPPCPRCPEPKSCDTPPPCPRCPEPKSCDTPPPCPRCPAPELLGGPSVFLFPPKPKDTLMISRTPEVTCVVVDVSHEDPEVQFKWYVDGVEVHNAKTKPREEQYNSTFRVVSVLTVLHQDWLNGKEYKCKVSNKALPAPIEKTISKTKGQPREPQVYTLPPSREEMTKNQVSLTCLVKGFYPSDIAVEWESSGQPENNYNTTPPMLDSDGSFFLYSKLTVDKSRWQQGNIFSCSVMHEALHNRFTQKSLSLSPGK

SEQ ID NO: 230 - protein, 327 aa, Homo sapiens
ASTKGPSVFPLAPCSRSTSESTAALGCLVKDYFPEPVTVSWNSGALTSGVHTFPAVLQSSGLYSLSSVVTVPSSSLGTKTYTCNVDHKPSNTKVDKRVESKYGPPCPSCPAPEFLGGPSVFLFPPKPKDTLMISRTPEVTCVVVDVSQEDPEVQFNWYVDGVEVHNAKTKPREEQFNSTYRVVSVLTVLHQDWLNGKEYKCKVSNKGLPSSIEKTISKAKGQPREPQVYTLPPSQEEMTKNQVSLTCLVKGFYPSDIAVEWESNGQPENNYKTTPPVLDSDGSFFLYSRLTVDKSRWQEGNVFSCSVMHEALHNHYTQKSLSLSLGK

SEQ ID NO: 231 - protein, 106 aa, Homo sapiens
TVAAPSVFIFPPSDEQLKSGTASVVCLLNNFYPREAKVQWKVDNALQSGNSQESVTEQDSKDSTYSLSSTLTLSKADYEKHKVYACEVTHQGLSSPVTKSFNRGEC

SEQ ID NO: 232 - protein, 107 aa, Homo sapiens [sequence omitted]

SEQ ID NO: 233 - protein, 105 aa, Homo sapiens
GQPKANPTVTLFPPSSEELQANKATLVCLISDFYPGAVTVAWKADGSPVKAGVETTKPSKQSNNKYAASSYLSLTPEQWKSHRSYSCQVTHEGSTVEKTVAPTEC

SEQ ID NO: 234 - protein, 380 aa, Artificial Sequence
  Description of Artificial Sequence: Synthetic polypeptide
DASLPYLQKESVFQSGAHAYRIPALLYLPGQQSLLAFAEQRRSKKDEHAELIVLRRGDYDAGTHQVQWQAQEVVAQARLDGHRSMNPCPLYDEQTGTLFLFFIAIPGQVTEQQQLQTRANVTRLCYVTSTDHGRTWSSPRDLTDAAIGPAYREWSTFAVGPGHCLQLHDRARSLVVPAYAYRKLHPKQRPIPSAFCFLSHDHGRTWARGHFVAQDTLECQVAEVETGEQRVVTLNARSHLRFRVQAQSTNDGLDFQESQLVKKLVEPPPTGCQGSVISFPSPRSGPGSPAQWLLYTHPTHSWQRADLGAYLNPRPPAPEAWSEPVLLAKGSAAYSDLQSMGTGPDGSPLFGCLYEANDYEEIVFLMFTLKQAFPAEYLPQ

SEQ ID NO: 235 - protein, 450 aa, Artificial Sequence
  Description of Artificial Sequence: Synthetic polypeptide
EVQLVQSGAEVKKPGATVKISCKVSGFNIKDTYMHWVQQAPGKGLEWMGLIDPANDNTIYAEKFQGRVTITADTSTDTAYMELSSLRSEDTAVYYCAREGYGGSYGEGYWGQGTLVTVSSASTKGPSVFPLAPSSKSTSGGTAALGCLVKDYFPEPVTVSWNSGALTSGVHTFPAVLQSSGLYSLSSVVTVPSSSLGTQTYICNVNHKPSNTKVDKKVEPKSCDKTHTCPPCPAPELLGGPSVFLFPPKPKDTLMISRTPEVTCVVVDVSHEDPEVKFNWYVDGVEVHNAKTKPREEQYNSTYRVVSVLTVLHQDWLNGKEYKCKVSNKALPAPIEKTISKAKGQPREPQVYTLPPSREEMTKNQVSLTCLVKGFYPSDIAVEWESNGQPENNYKTTPPVLDSDGSFFLYSKLTVDKSRWQQGNVFSCSVMHEALHNHYTQKSLSLSPGK

SEQ ID NO: 236 - protein, 120 aa, Artificial Sequence
  Description of Artificial Sequence: Synthetic polypeptide
  MOD_RES (5)..(5): Gln or Val
  MOD_RES (6)..(6): Glu or Gln
  MOD_RES (11)..(11): Leu or Val
  MOD_RES (12)..(12): Val or Lys
  MOD_RES (17)..(17): Ser or Thr
  MOD_RES (19)..(19): Thr or Lys
  MOD_RES (20)..(20): Leu or Ile
  MOD_RES (23)..(23): Thr or Lys
  MOD_RES (24)..(24): Ala or Val
  MOD_RES (38)..(38): Lys or Gln
  MOD_RES (40)..(40): Arg or Ala
  MOD_RES (42)..(42): Glu or Gly
  MOD_RES (43)..(43): Gln or Lys
  MOD_RES (48)..(48): Ile or Met
  MOD_RES (50)..(50): Arg or Leu
  MOD_RES (59)..(59): Lys or Ile
  MOD_RES (61)..(61): Asp or Ala
  MOD_RES (62)..(62): Pro or Glu
  MOD_RES (66)..(66): Asp or Gly
  MOD_RES (67)..(67): Lys or Arg
  MOD_RES (68)..(68): Ala or Val
  MOD_RES (76)..(76): Ser or Thr
  MOD_RES (81)..(81): Leu or Met
  MOD_RES (82)..(82): Arg or Glu
  MOD_RES (87)..(87): Thr or Arg
  MOD_RES (115)..(115): Thr or Leu
  MOD_RES (116)..(116): Leu or Val
EVQLXXSGAEXXKPGAXVXXSCXXSGFNIKDTYMHWVXQXPXXGLEWXGXIDPANDNTXYXXKFQXXXTITADTSXDTAYXXLSSLXSEDTAVYYCAREGYGGSYGEGYWGQGTXXTVSS

SEQ ID NO: 237 - protein, 107 aa, Artificial Sequence
  Description of Artificial Sequence: Synthetic polypeptide
  MOD_RES (1)..(1): Ser or Glu
  MOD_RES (7)..(7): Thr or Ser
  MOD_RES (9)..(9): Lys or Pro
  MOD_RES (10)..(10): Phe or Thr
  MOD_RES (12)..(12): Leu or Ser
  MOD_RES (13)..(13): Val or Leu
  MOD_RES (15)..(15): Ala or Pro
  MOD_RES (17)..(17): Asp or Glu
  MOD_RES (21)..(21): Ile or Leu
  MOD_RES (22)..(22): Thr or Ser
  MOD_RES (24)..(24): Lys or Arg
  MOD_RES (33)..(33): Val or Leu
  MOD_RES (34)..(34): Ile or Ser
  MOD_RES (43)..(43): Ser or Ala
  MOD_RES (45)..(45): Lys or Arg
  MOD_RES (58)..(58): Val or Ile
  MOD_RES (60)..(60): Asp or Ala
  MOD_RES (63)..(63): Ala or Ser
  MOD_RES (67)..(67): Tyr or Ser
  MOD_RES (73)..(73): Phe or Leu
  MOD_RES (76)..(76): Asn or Ser
  MOD_RES (77)..(77): Thr or Ser
  MOD_RES (78)..(78): Val or Leu
  MOD_RES (80)..(80): Ala or Pro
  MOD_RES (83)..(83): Leu or Phe
  MOD_RES (87)..(87): Phe or Tyr
  MOD_RES (93)..(93): Tyr or Thr
  MOD_RES (100)..(100): Gly or Gln
  MOD_RES (104)..(104): Leu or Val
XIVMTQXPXXLXXSXGXRVTXXCXASQSVSNDXXWYQQKPGQXPXLLIYYASIRFTGXPXRFXGSGXGTDFTXTIXXXQXEDXAVYXCQQDYXSPWTFGXGTKXEIK

SEQ ID NO: 238 - protein, 380 aa, Artificial Sequence
  Description of Artificial Sequence: Synthetic polypeptide
  MOD_RES (1)..(1): Ala, Arg, Asn, Asp, Gln, Glu, Gly, His, Leu, Lys, Met, Phe, Thr, Val, or not present
  MOD_RES (2)..(2): Ala or Lys
  MOD_RES (4)..(4): Asn or Leu
  MOD_RES (5)..(5): Pro or His
  MOD_RES (6)..(6): Phe, Trp, Tyr or Val
  MOD_RES (9)..(9): Lys or Asp
  MOD_RES (42)..(42): Ala or Arg
  MOD_RES (44)..(44): Lys, Arg, or Glu
  MOD_RES (45)..(45): Lys, Ala, Arg, or Glu
  MOD_RES (54)..(54): Leu or Met
  MOD_RES (62)..(62): Pro, Asn, Asp, His, Glu, Gly, Ser or Thr
  MOD_RES (69)..(69): Gln or His
  MOD_RES (78)..(78): Arg or Lys
  MOD_RES (80)..(80): Asp or Pro
  MOD_RES (93)..(93): Ala, Glu or Lys
  MOD_RES (107)..(107): Gly or Asp
  MOD_RES (108)..(108): Gln or His
  MOD_RES (112)..(112): Gln, Arg, or Lys
  MOD_RES (125)..(125): Ala, Cys, Ile, Ser, Val, or Leu
  MOD_RES (126)..(126): Gln, Leu, Glu, Phe, His, Ile, Leu, or Tyr
  MOD_RES (150)..(150): Ala or Val
  MOD_RES (164)..(164): Cys or Gly
  MOD_RES (170)..(170): Arg or Pro
  MOD_RES (171)..(171): Ala or Gly
  MOD_RES (187)..(187): Arg, Ile, or Lys
  MOD_RES (188)..(188): Gln or Pro
  MOD_RES (189)..(189): Arg or Pro
  MOD_RES (196)..(196): Ala, Cys, Leu, or Val
  MOD_RES (213)..(213): Ala, Cys, Asn, Ser, or Thr
  MOD_RES (217)..(217): Leu, Ala, or Val
  MOD_RES (225)..(225): Glu or Pro
  MOD_RES (239)..(239): His or Pro
  MOD_RES (240)..(240): Leu, Asp, Asn, or Tyr
  MOD_RES (241)..(241): Arg, Ala, Asp, Leu, Gln, or Tyr
  MOD_RES (242)..(242): Ala, Cys, Phe, Gly, His, Ile, Lys, Leu, Met, Asn, Gln, Arg, Ser, Val, Trp, or Tyr
  MOD_RES (244)..(244): Val, Ile, or Lys
  MOD_RES (249)..(249): Thr or Ala
  MOD_RES (251)..(251): Asp or Gly
  MOD_RES (257)..(257): Glu, Lys, or Pro
  MOD_RES (258)..(258): Ser or Cys
  MOD_RES (260)..(260): Leu, Asp, Phe, Gln, or Thr
  MOD_RES (265)..(265): Val or Phe
  MOD_RES (270)..(270): Gln, Ala, His, Phe, Pro, Ser, or Thr
  MOD_RES (272)..(272): Cys or Val
  MOD_RES (292)..(292): Trp or Arg
  MOD_RES (301)..(301): Ser, Arg, Ala, Asp, Glu, Phe, Gly, His, Ile, Lys, Leu, Met, Asn, Pro, Gln, Thr, Val, Trp, or Tyr
  MOD_RES (302)..(302): Trp, Lys, Ala, Asp, Glu, Phe, Gly, His, Ile, Lys, Leu, Met, Asn, Pro, Gln, Arg, Ser, Thr, Val, or Tyr
  MOD_RES (325)..(325): Lys or Val
  MOD_RES (332)..(332): Ala, Cys, Ser, or Val
  MOD_RES (352)..(352): Cys, Leu, or Val
  MOD_RES (363)..(363): Val or Arg
  MOD_RES (365)..(365): Leu, Gln, His, Ile, Lys, or Ser
  See specification as filed for detailed description of substitutions and preferred embodiments
XXSXXXLQXESVFQSGAHAYRIPALLYLPGQQSLLAFAEQRXSXXDEHAELIVXRRGDYDAXTHQVQWXAQEVVAQAXLXGHRSMNPCPLYDXQTGTLFLFFIAIPXXVTEXQQLQTRANVTRLXXVTSTDHGRTWSSPRDLTDAAIGPXYREWSTFAVGPGHXLQLHDXXRSLVVPAYAYRKLHPXXXPIPSAFXFLSHDHGRTWARGHFVXQDTXECQVAEVXTGEQRVVTLNARSXXXXRXQAQSXNXGLDFQXXQXVKKLXEPPPXGXQGSVISFPSPRSGPGSPAQXLLYTHPTHXXQRADLGAYLNPRPPAPEAWSEPXLLAKGSXAYSDLQSMGTGPDGSPLFGXLYEANDYEEIXFXMFTLKQAFPAEYLPQ

SEQ ID NO: 239 - protein, 380 aa, Artificial Sequence
  Description of Artificial Sequence: Synthetic polypeptide
  MOD_RES (1)..(1): Ala, Arg, Asn, Asp, Gln, Glu, Gly, His, Leu, Lys, Met, Phe, Thr, Val, or not present
  MOD_RES (6)..(6): Phe, Trp, Tyr or Val
  MOD_RES (9)..(9): Lys or Asp
  MOD_RES (42)..(42): Arg or Ala
  MOD_RES (62)..(62): Pro, Asn, Asp, His, Glu, Gly, Ser or Thr
  MOD_RES (93)..(93): Ala, Glu, or Lys
  MOD_RES (126)..(126): Gln, Leu, Glu, Phe, His, Ile, Leu, or Tyr
  MOD_RES (187)..(187): Arg, Ile, or Lys
  MOD_RES (242)..(242): Ala, Cys, Phe, Gly, His, Ile, Lys, Leu, Met, Asn, Gln, Arg, Ser, Val, Trp, or Tyr
  MOD_RES (270)..(270): Gln, Ala, His, Phe, Pro, Ser, or Thr
  MOD_RES (301)..(301): Ser, Arg, Ala, Asp, Glu, Phe, Gly, His, Ile, Lys, Leu, Met, Asn, Pro, Gln, Thr, Val, Trp, or Tyr
  MOD_RES (302)..(302): Trp, Lys, Ala, Asp, Glu, Phe, Gly, His, Ile, Lys, Leu, Met, Asn, Pro, Gln, Arg, Ser, Thr, Val, or Tyr
  MOD_RES (332)..(332): Ala, Cys, Ser, or Val
  MOD_RES (363)..(363): Val or Arg
  MOD_RES (365)..(365): Leu, Gln, His, Ile, Lys, or Ser
  See specification as filed for detailed description of substitutions and preferred embodiments
XASLPXLQXESVFQSGAHAYRIPALLYLPGQQSLLAFAEQRXSKKDEHAELIVLRRGDYDAXTHQVQWQAQEVVAQARLDGHRSMNPCPLYDXQTGTLFLFFIAIPGQVTEQQQLQTRANVTRLCXVTSTDHGRTWSSPRDLTDAAIGPAYREWSTFAVGPGHCLQLHDRARSLVVPAYAYRKLHPXQRPIPSAFCFLSHDHGRTWARGHFVAQDTLECQVAEVETGEQRVVTLNARSHLRXRVQAQSTNDGLDFQESQLVKKLVEPPPXGCQGSVISFPSPRSGPGSPAQWLLYTHPTHXXQRADLGAYLNPRPPAPEAWSEPVLLAKGSXAYSDLQSMGTGPDGSPLFGCLYEANDYEEIXFXMFTLKQAFPAEYLPQ

SEQ ID NO: 240 - protein, 617 aa, Artificial Sequence
  Description of Artificial Sequence: Synthetic polypeptide
  MOD_RES (1)..(1): Ala, Arg, Asn, Asp, Gln, Glu, Gly, His, Leu, Lys, Met, Phe, Thr, Val, or not present
  MOD_RES (2)..(2): Ala or Lys
  MOD_RES (4)..(4): Asn or Leu
  MOD_RES (5)..(5): Pro or His
  MOD_RES (6)..(6): Phe, Trp, Tyr or Val
  MOD_RES (9)..(9): Lys or Asp
  MOD_RES (42)..(42): Ala or Arg
  MOD_RES (44)..(44): Lys, Arg, or Glu
  MOD_RES (45)..(45): Lys, Ala, Arg, or Glu
  MOD_RES (54)..(54): Leu or Met
  MOD_RES (62)..(62): Pro, Asn, Asp, His, Glu, Gly, Ser or Thr
  MOD_RES (69)..(69): Gln or His
  MOD_RES (78)..(78): Arg or Lys
  MOD_RES (80)..(80): Asp or Pro
  MOD_RES (93)..(93): Ala, Glu or Lys
  MOD_RES (107)..(107): Gly or Asp
  MOD_RES (108)..(108): Gln or His
  MOD_RES (112)..(112): Gln, Arg, or Lys
  MOD_RES (125)..(125): Ala, Cys, Ile, Ser, Val, or Leu
  MOD_RES (126)..(126): Gln, Leu, Glu, Phe, His, Ile, Leu, or Tyr
  MOD_RES (150)..(150): Ala or Val
  MOD_RES (164)..(164): Cys or Gly
  MOD_RES (170)..(170): Arg or Pro
  MOD_RES (171)..(171): Ala or Gly
  MOD_RES (187)..(187): Arg, Ile, or Lys
  MOD_RES (188)..(188): Gln or Pro
  MOD_RES (189)..(189): Arg or Pro
  MOD_RES (196)..(196): Ala, Cys, Leu, or Val
  MOD_RES (213)..(213): Ala, Cys, Asn, Ser, or Thr
  MOD_RES (217)..(217): Leu, Ala, or Val
  MOD_RES (225)..(225): Glu or Pro
  MOD_RES (239)..(239): His or Pro
  MOD_RES (240)..(240): Leu, Asp, Asn, or Tyr
  MOD_RES (241)..(241): Arg, Ala, Asp, Leu, Gln, or Tyr
  MOD_RES (242)..(242): Ala, Cys, Phe, Gly, His, Ile, Lys, Leu, Met, Asn, Gln, Arg, Ser, Val, Trp, or Tyr
  MOD_RES (244)..(244): Val, Ile, or Lys
  MOD_RES (249)..(249): Thr or Ala
  MOD_RES (251)..(251): Asp or Gly
  MOD_RES (257)..(257): Glu, Lys, or Pro
  MOD_RES (258)..(258): Ser or Cys
  MOD_RES (260)..(260): Leu, Asp, Phe, Gln, or Thr
  MOD_RES (265)..(265): Val or Phe
  MOD_RES (270)..(270): Gln, Ala, His, Phe, Pro, Ser, or Thr
  MOD_RES (272)..(272): Cys or Val
  MOD_RES (292)..(292): Trp or Arg
  MOD_RES (301)..(301): Ser, Arg, Ala, Asp, Glu, Phe, Gly, His, Ile, Lys, Leu, Met, Asn, Pro, Gln, Thr, Val, Trp, or Tyr
  MOD_RES (302)..(302): Trp, Lys, Ala, Asp, Glu, Phe, Gly, His, Ile, Lys, Leu, Met, Asn, Pro, Gln, Arg, Ser, Thr, Val, or Tyr
  MOD_RES (325)..(325): Lys or Val
  MOD_RES (332)..(332): Ala, Cys, Ser, or Val
  MOD_RES (352)..(352): Cys, Leu, or Val
  MOD_RES (363)..(363): Val or Arg
  MOD_RES (365)..(365): Leu, Gln, His, Ile, Lys, or Ser
  MOD_RES (381)..(390): This region may encompass one of the following sequences: "GGGGS" or "GGGGSGGGGS" or "EPKSS"
  See specification as filed for detailed description of substitutions and preferred embodiments
XXSXXXLQXESVFQSGAHAYRIPALLYLPGQQSLLAFAEQRXSXXDEHAELIVXRRGDYDAXTHQVQWXAQEVVAQAXLXGHRSMNPCPLYDXQTGTLFLFFIAIPXXVTEXQQLQTRANVTRLXXVTSTDHGRTWSSPRDLTDAAIGPXYREWSTFAVGPGHXLQLHDXXRSLVVPAYAYRKLHPXXXPIPSAFXFLSHDHGRTWARGHFVXQDTXECQVAEVXTGEQRVVTLNARSXXXXRXQAQSXNXGLDFQXXQXVKKLXEPPPXGXQGSVISFPSPRSGPGSPAQXLLYTHPTHXXQRADLGAYLNPRPPAPEAWSEPXLLAKGSXAYSDLQSMGTGPDGSPLFGXLYEANDYEEIXFXMFTLKQAFPAEYLPQXXXXXXXXXXDKTHTCPPCPAPELLGGPSVFLFPPKPKDTLMISRTPEVTCVVVDVSHEDPEVKFNWYVDGVEVHNAKTKPREEQYNSTYRVVSVLTVLHQDWLNGKEYKCKVSNKALPAPIEKTISKAKGQPREPQVYTLPPSREEMTKNQVSLTCLVKGFYPSDIAVEWESNGQPENNYKTTPPVLDSDGSFFLTSKLTVDKSRWQQGNVFSCSVMHEALHNHYTQKSLSLSPGK

SEQ ID NO: 241 - protein, 617 aa, Artificial Sequence
  Description of Artificial Sequence: Synthetic polypeptide
  MOD_RES (1)..(1): Ala, Arg, Asn, Asp, Gln, Glu, Gly, His, Leu, Lys, Met, Phe, Thr, Val, or not present
  MOD_RES (6)..(6): Phe, Trp, Tyr or Val
  MOD_RES (9)..(9): Lys or Asp
  MOD_RES (42)..(42): Arg or Ala
  MOD_RES (62)..(62): Pro, Asn, Asp, His, Glu, Gly, Ser or Thr
  MOD_RES (93)..(93): Ala, Glu, or Lys
  MOD_RES (126)..(126): Gln, Leu, Glu, Phe, His, Ile, Leu, or Tyr
  MOD_RES (187)..(187): Arg, Ile, or Lys
  MOD_RES (242)..(242): Ala, Cys, Phe, Gly, His, Ile, Lys, Leu, Met, Asn, Gln, Arg, Ser, Val, Trp, or Tyr
  MOD_RES (270)..(270): Gln, Ala, His, Phe, Pro, Ser, or Thr
  MOD_RES (301)..(301): Ser, Arg, Ala, Asp, Glu, Phe, Gly, His, Ile, Lys, Leu, Met, Asn, Pro, Gln, Thr, Val, Trp, or Tyr
  MOD_RES (302)..(302): Trp, Lys, Ala, Asp, Glu, Phe, Gly, His, Ile, Lys, Leu, Met, Asn, Pro, Gln, Arg, Ser, Thr, Val, or Tyr
  MOD_RES (332)..(332): Ala, Cys, Ser, or Val
  MOD_RES (363)..(363): Val or Arg
  MOD_RES (365)..(365): Leu, Gln, His, Ile, Lys, or Ser
  MOD_RES (381)..(390): This region may encompass one of the following sequences: "GGGGS" or "GGGGSGGGGS" or "EPKSS"
  See specification as filed for detailed description of substitutions and preferred embodiments
XASLPXLQXESVFQSGAHAYRIPALLYLPGQQSLLAFAEQRXSKKDEHAELIVLRRGDYDAXTHQVQWQAQEVVAQARLDGHRSMNPCPLYDXQTGTLFLFFIAIPGQVTEQQQLQTRANVTRLCXVTSTDHGRTWSSPRDLTDAAIGPAYREWSTFAVGPGHCLQLHDRARSLVVPAYAYRKLHPXQRPIPSAFCFLSHDHGRTWARGHFVAQDTLECQVAEVETGEQRVVTLNARSHLRXRVQAQSTNDGLDFQESQLVKKLVEPPPXGCQGSVISFPSPRSGPGSPAQWLLYTHPTHXXQRADLGAYLNPRPPAPEAWSEPVLLAKGSXAYSDLQSMGTGPDGSPLFGCLYEANDYEEIXFXMFTLKQAFPAEYLPQXXXXXXXXXXDKTHTCPPCPAPELLGGPSVFLFPPKPKDTLMISRTPEVTCVVVDVSHEDPEVKFNWYVDGVEVHNAKTKPREEQYNSTYRVVSVLTVLHQDWLNGKEYKCKVSNKALPAPIEKTISKAKGQPREPQVYTLPPSREEMTKNQVSLTCLVKGFYPSDIAVEWESNGQPENNYKTTPPVLDSDGSFFLTSKLTVDKSRWQQGNVFSCSVMHEALHNHYTQKSLSLSPGK

SEQ ID NO: 242 - protein, 107 aa, Artificial Sequence
  Description of Artificial Sequence: Synthetic polypeptide
EIVMTQSPPTLSLSPGERVTLSCRASQSVSNDLSWYQQKPGQAPRLLIYYASTRATGIPARFSGSGSGTDFTLTISSLQPEDFAVYYCQQDYNSPWTFGQGTKVEIK

SEQ ID NO: 243 - protein, 107 aa, Artificial Sequence
  Description of Artificial Sequence: Synthetic polypeptide
EIVMTQSPPTLSLSPGERVTLSCRASQSVSNDLSWYQQKPGQAPRLLIYYASIRATGIPARFSGSGSGTDFTLTISSLQPEDFAVYYCQQDYNSPWTFGQGTKVEIK

SEQ ID NO: 244 - protein, 107 aa, Artificial Sequence
  Description of Artificial Sequence: Synthetic polypeptide
EIVMTQSPPTLSLSPGERVTLSCRASQSVSNDLSWYQQKPGQAPRLLIYYASTRFTGIPARFSGSGSGTDFTLTISSLQPEDFAVYYCQQDYNSPWTFGQGTKVEIK

SEQ ID NO: 245 - protein, 107 aa, Artificial Sequence
  Description of Artificial Sequence: Synthetic polypeptide
EIVMTQSPPTLSLSPGERVTLSCRASQSVSNDLSWYQQKPGQAPRLLIYYASTRATGIPARFSGSGYGTDFTLTISSLQPEDFAVYYCQQDYNSPWTFGQGTKVEIK

SEQ ID NO: 246 - protein, 107 aa, Artificial Sequence
  Description of Artificial Sequence: Synthetic polypeptide
EIVMTQSPPTLSLSPGERVTLSCRASQSVSNDLSWYQQKPGQAPRLLIYYASTRATGIPARFSGSGSGTDFTLTISSLQPEDFAVYFCQQDYNSPWTFGQGTKVEIK

SEQ ID NO: 247 - protein, 107 aa, Artificial Sequence
  Description of Artificial Sequence: Synthetic polypeptide
EIVMTQSPPTLSLSPGERVTLSCRASQSVSNDLSWYQQKPGQAPRLLIYYASIRATGIPARFSGSGYGTDFTLTISSLQPEDFAVYYCQQDYNSPWTFGQGTKVEIK

SEQ ID NO: 248 - protein, 107 aa, Artificial Sequence
  Description of Artificial Sequence: Synthetic polypeptide
EIVMTQSPPTLSLSPGERVTLSCRASQSVSNDLSWYQQKPGQAPRLLIYYASIRATGIPARFSGSGSGTDFTLTISSLQPEDFAVYFCQQDYNSPWTFGQGTKVEIK

SEQ ID NO: 249 - protein, 107 aa, Artificial Sequence
  Description of Artificial Sequence: Synthetic polypeptide
EIVMTQSPPTLSLSPGERVTLSCRASQSVSNDLSWYQQKPGQAPRLLIYYASIRATGIPARFSGSGYGTDFTLTISSLQPEDFAVYFCQQDYNSPWTFGQGTKVEIK

SEQ ID NO: 250 - protein, 5 aa, Artificial Sequence
  Description of Artificial Sequence: Synthetic peptide
DTYMH

SEQ ID NO: 251 - protein, 17 aa, Artificial Sequence
  Description of Artificial Sequence: Synthetic peptide
RIDPANDNTKYDPKFQD

SEQ ID NO: 252 - protein, 17 aa, Artificial Sequence
  Description of Artificial Sequence: Synthetic peptide
LIDPANDNTIYAEKFQG

SEQ ID NO: 253 - protein, 11 aa, Artificial Sequence
  Description of Artificial Sequence: Synthetic peptide
KASQSVSNDVI

SEQ ID NO: 254 - protein, 7 aa, Artificial Sequence
  Description of Artificial Sequence: Synthetic peptide
YASIRFT

SEQ ID NO: 255 - protein, 11 aa, Artificial Sequence
  Description of Artificial Sequence: Synthetic peptide
RASQSVSNDLS

SEQ ID NO: 256 - protein, 10 aa, Artificial Sequence
  Description of Artificial Sequence: Synthetic 10xHis tag
HHHHHHHHHH

SEQ ID NO: 257 - protein, 15 aa, Artificial Sequence
  Description of Artificial Sequence: Synthetic peptide
  SITE (1)..(15): This sequence may encompass 1-5 "Gly Gly Pro" repeating units
GGPGGPGGPGGPGGP

SEQ ID NO: 258 - protein, 25 aa, Artificial Sequence
  Description of Artificial Sequence: Synthetic peptide
  SITE (1)..(25): This sequence may encompass 1-5 "Gly Gly Gly Gly Ser" repeating units
GGGGSGGGGSGGGGSGGGGSGGGGS

SEQ ID NO: 259 - protein, 6 aa, Artificial Sequence
  Description of Artificial Sequence: Synthetic 6xHis tag
HHHHHH

What is claimed is:

1. An isolated antibody that binds human PD-L1 comprising:
(i) an immunoglobulin heavy chain variable region comprising a CDR_{H1} comprising the amino acid sequence of SEQ ID NO: 161, a CDR_{H2} comprising the amino acid sequence of SEQ ID NO: 162, and a CDR_{H3} comprising the amino acid sequence of SEQ ID NO: 163 (PAL769-h769-VH); and/or an immunoglobulin light chain variable region comprising a CDR_{L1} comprising the amino acid sequence of SEQ ID NO: 165, a CDR_{L2} comprising the amino acid sequence of SEQ ID NO: 142, and a CDR_{L3} comprising the amino acid sequence of SEQ ID NO: 166 (PAL769-VL, h769-IF3-VL, h769-tm2-VL, h769-tm3-VL);
(ii) an immunoglobulin heavy chain variable region comprising a CDR_{H1} comprising the amino acid sequence of SEQ ID NO: 161, a CDR_{H2} comprising the amino acid sequence of SEQ ID NO: 162, and a CDR_{H3} comprising the amino acid sequence of SEQ ID NO: 163 (PAL769-h769-VH); and/or an immunoglobulin light chain variable region comprising a CDR_{L1} comprising the amino acid sequence of SEQ ID NO: 165, a CDRL2 comprising the amino acid sequence of SEQ ID NO: 142, and a CDRL3 comprising the amino acid sequence of SEQ ID NO: 203 (h769.T-VL);
(iii) an immunoglobulin heavy chain variable region comprising a CDR_{H1} comprising the amino acid sequence of SEQ ID NO: 129, a CDR_{H2} comprising the amino acid sequence of SEQ ID NO: 130, and a CDR_{H3} comprising the amino acid sequence of SEQ ID NO: 131 (PAL752-VH); and/or an immunoglobulin light chain variable region comprising a CDR_{L1} comprising the amino acid sequence of SEQ ID NO: 133, a CDR_{L2} comprising the amino acid sequence of SEQ ID NO: 134, and a CDR_{L3} comprising the amino acid sequence of SEQ ID NO: 135 (PAL752-VL);
(iv) an immunoglobulin heavy chain variable region comprising a CDR_{H1} comprising the amino acid sequence of SEQ ID NO: 137, a CDR_{H2} comprising the amino acid sequence of SEQ ID NO: 138, and/or a CDR_{H3} comprising the amino acid sequence of SEQ ID NO: 139 (PAL759-VH); and an immunoglobulin light chain variable region comprising a CDR_{L1} comprising the amino acid sequence of SEQ ID NO: 141, a CDR_{L2} comprising the amino acid sequence of SEQ ID NO: 142, and a CDR_{L3} comprising the amino acid sequence of SEQ ID NO: 143 (PAL759-VL);
(v) an immunoglobulin heavy chain variable region comprising a CDR_{H1} comprising the amino acid sequence of SEQ ID NO: 145, a CDR_{H2} comprising the amino acid sequence of SEQ ID NO: 146, and a CDR_{H3} comprising the amino acid sequence of SEQ ID NO: 147 (PAL760-VH); and/or an immunoglobulin light chain variable region comprising a CDR_{L1} comprising the amino acid sequence of SEQ ID NO: 149, a CDR_{L2} comprising the amino acid sequence of SEQ ID NO: 150, and a CDR_{L3} comprising the amino acid sequence of SEQ ID NO: 151 (PAL760-VL);
(vi) an immunoglobulin heavy chain variable region comprising a CDR_{H1} comprising the amino acid sequence of SEQ ID NO: 153, a CDR_{H2} comprising the amino acid sequence of SEQ ID NO: 154, and a CDR_{H3} comprising the amino acid sequence of SEQ ID NO: 155 (PAL767-VH); and/or an immunoglobulin light chain variable region comprising a CDR_{L1} comprising the amino acid sequence of SEQ ID NO: 157, a CDR_{L2} comprising the amino acid sequence of SEQ ID NO: 158, and a CDR_{L3} comprising the amino acid sequence of SEQ ID NO: 159 (PAL767-VL);
(vii) an immunoglobulin heavy chain variable region comprising a CDR_{H1} comprising the amino acid sequence of SEQ ID NO: 161, a CDR_{H2} comprising the amino acid sequence of SEQ ID NO: 168, and a CDR_{H3} comprising the amino acid sequence of SEQ ID NO: 169 (PAL771-VH); and/or an immunoglobulin light chain variable region comprising a CDR_{L1} comprising the amino acid sequence of SEQ ID NO: 171, a CDR_{L2} comprising the amino acid sequence of SEQ ID NO: 172, and a CDR_{L3} comprising the amino acid sequence of SEQ ID NO: 173 (PAL771-VL);
(viii) an immunoglobulin heavy chain variable region comprising a CDR_{H1} comprising the amino acid sequence of SEQ ID NO: 175, a CDR_{H2} comprising the amino acid sequence of SEQ ID NO: 176, and a CDR_{H3} comprising the amino acid sequence of SEQ ID NO: 177 (PAL785-VH); and/or an immunoglobulin light chain variable region comprising a CDR_{L1} comprising the amino acid sequence of SEQ ID NO: 179, a CDR_{L2} comprising the amino acid sequence of SEQ ID NO: 180, and a CDR_{L3} comprising the amino acid sequence of SEQ ID NO: 181 (PAL785-VL);
(ix) an immunoglobulin heavy chain variable region comprising a CDR_{H1} comprising the amino acid sequence of SEQ ID NO: 183, a CDR_{H2} comprising the amino acid sequence of SEQ ID NO: 184, and a CDR_{H3} comprising the amino acid sequence of SEQ ID NO: 185 (PAL787-VH); and/or an immunoglobulin light chain variable region comprising a CDR_{L1} comprising the amino acid sequence of SEQ ID NO: 187, a CDR_{L2} comprising the amino acid sequence of SEQ ID NO: 188, and a CDR_{L3} comprising the amino acid sequence of SEQ ID NO: 189 (PAL787-VL); or
(x) an immunoglobulin heavy chain variable region comprising a CDR_{H1} comprising the amino acid sequence of SEQ ID NO: 191, a CDR_{H2} comprising the amino acid sequence of SEQ ID NO: 192, and a CDR_{H3} comprising the amino acid sequence of SEQ ID NO: 193 (PAL788-VH); and/or an immunoglobulin light chain variable region comprising a CDR_{L1} comprising the amino acid sequence of SEQ ID NO: 195, a CDR_{L2} comprising the amino acid sequence of SEQ ID NO: 196, and a CDR_{L3} comprising the amino acid sequence of SEQ ID NO: 197 (PAL788-VL).

2. The isolated antibody of claim 1, wherein the CDRs are interposed between human or humanized immunoglobulin framework regions.

3. An isolated antibody that binds human PD-L1 comprising:
(i) an immunoglobulin heavy chain variable region comprising the amino acid sequence of SEQ ID NO: 164 (PAL769-VH), and an immunoglobulin light chain variable region comprising the amino acid sequence of SEQ ID NO: 167 (PAL769-VL);
(ii) an immunoglobulin heavy chain variable region comprising the amino acid sequence of SEQ ID NO: 199 (h769 VH), and an immunoglobulin light chain variable region comprising the amino acid sequence of SEQ ID NO: 200 (h769-IF3-VL);
(iii) an immunoglobulin heavy chain variable region comprising the amino acid sequence of SEQ ID NO: 199 (h769-VH), and an immunoglobulin light chain variable region comprising the amino acid sequence of SEQ ID NO: 201 (h769-tm2-VL);
(iv) an immunoglobulin heavy chain variable region comprising the amino acid sequence of SEQ ID NO: 199 (h769 VH), and an immunoglobulin light chain variable region comprising the amino acid sequence of SEQ ID NO: 202 (h769-tm3-VL);
(v) an immunoglobulin heavy chain variable region comprising the amino acid sequence of SEQ ID NO: 199 (h769-VH), and an immunoglobulin light chain variable region comprising the amino acid sequence of SEQ ID NO: 204 (h769.T-VL);
(vi) an immunoglobulin heavy chain variable region comprising the amino acid sequence of SEQ ID NO: 132 (PAL752-VH), and an immunoglobulin light chain variable region comprising the amino acid sequence of SEQ ID NO: 136 (PAL752-VL);
(vii) an immunoglobulin heavy chain variable region comprising the amino acid sequence of SEQ ID NO: 140 (PAL759-VH), and an immunoglobulin light chain variable region comprising the amino acid sequence of SEQ ID NO: 144 (PAL759-VL);
(viii) an immunoglobulin heavy chain variable region comprising the amino acid sequence of SEQ ID NO: 148 (PAL760-VH), and an immunoglobulin light chain variable region comprising the amino acid sequence of SEQ ID NO: 152 (PAL760-VL);
(ix) an immunoglobulin heavy chain variable region comprising the amino acid sequence of SEQ ID NO: 156 (PAL767-VH), and an immunoglobulin light chain variable region comprising the amino acid sequence of SEQ ID NO: 160 (PAL767-VL);
(x) an immunoglobulin heavy chain variable region comprising the amino acid sequence of SEQ ID NO: 170 (PAL771-VH), and an immunoglobulin light chain variable region comprising the amino acid sequence of SEQ ID NO: 174 (PAL771-VL);
(xi) an immunoglobulin heavy chain variable region comprising the amino acid sequence of SEQ ID NO: 178 (PAL785-VH), and an immunoglobulin light chain variable region comprising the amino acid sequence of SEQ ID NO: 182 (PAL785-VL);
(xii) an immunoglobulin heavy chain variable region comprising the amino acid sequence of SEQ ID NO: 186 (PAL787-VH), and an immunoglobulin light chain variable region comprising the amino acid sequence of SEQ ID NO: 190 (PAL787-VL); or
(xiii) an immunoglobulin heavy chain variable region comprising the amino acid sequence of SEQ ID NO: 194 (PAL788-VH), and an immunoglobulin light chain variable region comprising the amino acid sequence of SEQ ID NO: 198 (PAL788-VL).

4. The isolated antibody of any one of claims 1-3, further comprising a heavy chain and/or light chain constant region.

5. The isolated antibody of claim 4, wherein the heavy chain constant region is selected from an IgG1, IgG2, IgG3, and IgG4 heavy chain constant region.

6. The isolated antibody of any one of claims 1-5, wherein the antibody binds to human PD-L1 with a K_{D} of 5 nM or lower, 1 nM or lower, 0.75 nM or lower, 0.5 nM or lower, 0.1 nM, 0.075 nM, or 0.05 nM or lower, as measured by surface plasmon resonance or bio-layer interferometry.

7. The isolated antibody of any one of claims 1-6, wherein the antibody also binds to Macaca fascicularis (cynomolgus) PD-L1.

8. An isolated antibody that competes with the antibody of any one of claims 1-7 for binding to human PD-L1.

9. An isolated antibody that binds to the same epitope on human PD-L1 as the antibody of any one of claims 1-8.

10. An isolated nucleic acid comprising a nucleotide sequence encoding the immunoglobulin heavy chain variable region of any one of claims 1-7 and/or a nucleotide sequence encoding the immunoglobulin light chain variable region of any one of claims 1-7.

11. An expression vector comprising: (i) a nucleic acid comprising a nucleotide sequence encoding the immunoglobulin heavy chain variable region of any one of claims 1-7; and/or (ii) a nucleic acid comprising a nucleotide sequence encoding the immunoglobulin light chain variable region of any one of claims 1-7.

12. A host cell comprising the expression vector of claim 11.

13. A fusion protein comprising:
(a) a sialidase enzyme; and
(b) an anti-PD-L1 immunoglobulin antigen-binding domain derived from the anti-PD-L1 antibody of any one of claims 1-9.

14. The fusion protein of claim 13, wherein the sialidase is a human sialidase.

15. The fusion protein of claim 13 or 14, wherein the sialidase is a recombinant mutant human sialidase.

16. The fusion protein of claim 15, wherein the sialidase comprises:
(a) a substitution or deletion of a methionine residue at a position corresponding to position 1 of wild-type human Neu2 (M1);
(b) a substitution of a valine residue at a position corresponding to position 6 of wild-type human Neu2 (V6);
(c) a substitution of a lysine residue at a position corresponding to position 9 of wild-type human Neu2 (K9);
(d) a substitution of an alanine residue at a position corresponding to position 42 of wild-type human Neu2 (A42);
(e) a substitution of a proline residue at a position corresponding to position 62 of wild-type human Neu2 (P62);
(f) a substitution of an alanine residue at a position corresponding to position 93 of wild-type human Neu2 (A93);
(g) a substitution of a glutamine residue at a position corresponding to position 126 of wild-type human Neu2 (Q126);
(h) a substitution of an isoleucine residue at a position corresponding to position 187 of wild-type human Neu2 (I187);
a substitution of an alanine residue at a position corresponding to position 242 of wild-type human Neu2 (A242);
a substitution of a glutamine residue at a position corresponding to position 270 of wild-type human Neu2 (Q270);
(k) a substitution of a serine residue at a position corresponding to position 301 of wild-type human Neu2 (S301);
(l) a substitution of a tryptophan residue at a position corresponding to position 302 of wild-type human Neu2 (W302);
(m) a substitution of a cysteine residue at a position corresponding to position 332 of wild-type human Neu2 (C332);
(n) a substitution of a valine residue at a position corresponding to position 363 of wild-type human Neu2 (V363); or
(o) a substitution of a leucine residue at a position corresponding to position 365 of wild-type human Neu2 (L365);
or a combination of any of the foregoing substitutions.

17. The fusion protein of claim 16, wherein, in the sialidase:
(a) the methionine residue at a position corresponding to position 1 of wild-type human Neu2 is deleted (ΔM1), is substituted by alanine (M1A), or is substituted by aspartic acid (M1D);
(b) the valine residue at a position corresponding to position 6 of wild-type human Neu2 is substituted by tyrosine (V6Y);
(c) the alanine residue at a position corresponding to position 42 of wild-type human Neu2 is substituted by arginine (A42R)
(d) the lysine residue at a position corresponding to position 9 of wild-type human Neu2 is substituted by aspartic acid (K9D);
(e) the proline residue at a position corresponding to position 62 of wild-type human Neu2 is substituted by asparagine (P62N), aspartic acid (P62D), histidine (P62H), glutamic acid (P62E), glycine (P62G), serine (P62S), or threonine (P62T);
(f) the alanine residue at a position corresponding to position 93 of wild-type human Neu2 is substituted by glutamic acid (A93E) or lysine (A93K);
(g) the glutamine residue at a position corresponding to position 126 of wild-type human Neu2 is substituted by leucine (Q126L), glutamic acid (Q126E), phenylalanine (Q126F), histidine (Q126H), isoleucine (Q126I), or tyrosine (Q126Y);
(h) the isoleucine residue at a position corresponding to position 187 of wild-type human Neu2 is substituted by lysine (I187K);
(i) the alanine residue at a position corresponding to position 242 of wild-type human Neu2 is substituted by cysteine (A242C), phenylalanine (A242F), glycine (A242G), histidine (A242H), isoleucine (A242I), lysine (A242K), leucine (A242L), methionine (A242M), asparagine (A242N), glutamine (A242Q), arginine (A242R), serine (A242S), valine (A242V), tryptophan (A242W), or tyrosine (A242Y);
(j) the glutamine residue at a position corresponding to position 270 of wild-type human Neu2 is substituted by alanine (Q270A), histidine (Q270H), phenylalanine (Q270F), proline (Q270P), serine (Q270S), or threonine (Q270T);
(k) the serine residue at a position corresponding to position 301 of wild-type human Neu2 is substituted by alanine (S301A), aspartic acid (S301D), glutamic acid (S301E), phenylalanine (S301F), histidine (S301H), lysine (S301K), leucine (S301L), methionine (S301M), asparagine (S301N), proline (S301P), glutamine (S301Q), arginine (S301R), threonine (S301T), valine (S301V), tryptophan (S301W), or tyrosine (S301Y);
(l) the tryptophan residue at a position corresponding to position 302 of wild-type human Neu2 is substituted by alanine (W302A), aspartic acid (W302D), phenylalanine (W302F), glycine (W302G), histidine (W302H), isoleucine (W3021), lysine (W302K), leucine (W302L), methionine (W302M), asparagine (W302N), proline (W302P), glutamine (W302Q), arginine (W302R), serine (W302S), threonine (W302T), valine (W302V), or tyrosine (W302Y);
(m) the cysteine residue at a position corresponding to position 332 of wild-type human Neu2 is substituted by alanine (C332A);
(n) the valine residue at a position corresponding to position 363 of wild-type human Neu2 is substituted by arginine (V363R); or
(o) the leucine residue at a position corresponding to position 365 of wild-type human Neu2 is substituted by glutamine (L365Q), histidine (L365H), isoleucine (L365I), lysine (L365K) or serine (L365S);
or the sialidase comprises a combination of any of the foregoing substitutions.

18. The fusion protein of claim 17, wherein the sialidase comprises a substitution selected from ΔM1, M1A, M1D, V6Y, K9D, A42R, P62G, P62N, P62S, P62T, A93E, Q126Y, I187K, A242F, A242W, A242Y, Q270A, Q270T, S301A, S301R, W302K, W302R, C332A, V363R, and L365I, or a combination of any of the foregoing substitutions.

19. The fusion protein of claim 18, wherein the sialidase comprises:
(a) the M1D, V6Y, P62G, A93E, I187K, and C332A substitutions;
(b) the M1D, V6Y, K9D, A93E, I187K, C332A, V363R, and L365I substitutions;
(c) the M1D, V6Y, P62N, I187K, and C332A substitutions;
(d) the M1D, V6Y, I187K, Q270A, S301R, W302K, and C332A substitutions;
(e) the M1D, V6Y, P62S, I187K, Q270A, S301R, W302K, and C332A substitutions;
(f) the M1D, V6Y, P62T, I187K, Q270A, S301R, W302K, and C332A substitutions;
(g) the M1D, V6Y, P62N, I187K, Q270A, S301R, W302K, and C332A substitutions;
(h) the M1D, V6Y, P62G, A93E, I187K, S301A, W302R, and C332A substitutions;
(i) the M1D, V6Y, P62G, A93E, Q126Y, I187K, Q270T, and C332A substitutions;
(j) the M1D, V6Y, P62G, A93E, Q126Y, I187K, and C332A substitutions;
(k) the M1D, V6Y, P62G, A93E, Q126Y, I187K, A242F, Q270T, and C332A substitutions; or
(l) the M1D, V6Y, A42R, P62G, A93E, Q126Y, I187K, A242F, Q270T, and C332A mutations.

20. The fusion protein of any one of claims 13-19, wherein the sialidase is selected from Neu1, Neu2, Neu3, and Neu4.

21. The fusion protein of claim 20, wherein the sialidase is Neu2.

22. The fusion protein of any one of claims 13-21, wherein the sialidase has a different substrate specificity than the corresponding wild-type sialidase.

23. The fusion protein of claim 22, wherein the sialidase can cleave α2,3, α2,6, and/or α2,8 linkages.

24. The fusion protein of claim 23, wherein the sialidase can cleave α2,3 and α2,8 linkages.

25. The fusion protein of any one of claims 13-24, wherein the sialidase comprises any one of SEQ ID NOs: 48-62, 94, 97, 100, 126, or 234.

26. The fusion protein of any one of claims 13-25, wherein the sialidase comprises a mutation set forth in any one of Tables 1-9.

27. The fusion protein of any one of claims 13-26, wherein the fusion protein further comprises an immunoglobulin Fc domain.

28. The fusion protein of claim 27, wherein the immunoglobulin Fc domain is derived from a human IgG1, IgG2, IgG3, IgG4, IgA1, IgA2, IgD, IgE, or IgM Fc domain.

29. The fusion protein of claim 28, wherein the immunoglobulin Fc domain is derived from a human IgG1, IgG2, IgG3, or IgG4 Fc domain.

30. The fusion protein of claim 29, wherein the immunoglobulin Fc domain is derived from a human IgG1 Fc domain.

31. The fusion protein of any one of claims 13-30, wherein the anti-PD-L1 immunoglobulin antigen-binding domain is associated with a second anti-PD-L1 immunoglobulin antigen-binding domain derived from the anti-PD-L1 antibody of any one of claims 1-9 to produce an anti-PD-L1 antigen-binding site.

32. The fusion protein of any one of claims 13-31, wherein the sialidase and the immunoglobulin Fc domain and/or the anti-PD-L1 immunoglobulin antigen-binding domain are linked by a peptide bond or an amino acid linker.

33. The fusion protein of any one of claims 13-32, wherein the fusion protein comprises any one of SEQ ID NOs: 205-207, 211, 213, 214, and 219.

34. An antibody conjugate comprising the fusion protein of any one of claims 13-33.

35. The antibody conjugate of claim 34, wherein the antibody conjugate comprises a single sialidase.

36. The antibody conjugate of claim 34, wherein the antibody conjugate comprises two sialidases.

37. The antibody conjugate of claim 36, wherein the two sialidases are identical.

38. The antibody conjugate of any one of claims 34-37, wherein the antibody conjugate comprises a single anti-PD-L1 antigen-binding site.

39. The antibody conjugate of any one of claims 34-37, wherein the antibody conjugate comprises two anti-PD-L1 antigen-binding sites.

40. The antibody conjugate of claim 39, wherein the two anti-PD-L1 antigen-binding sites are identical.

41. The antibody conjugate of any one of claims 34-40, wherein the antibody conjugate has a molecular weight from about 135 kDa to about 165 kDa.

42. The antibody conjugate of any one of claims 34-40, wherein the antibody conjugate has a molecular weight from about 215 kDa to about 245 kDa.

43. The antibody conjugate of any one of claims 34-42, wherein the antibody conjugate comprises:
(a) a first polypeptide comprising an immunoglobulin light chain;
(b) a second polypeptide comprising an immunoglobulin heavy chain; and
(c) a third polypeptide comprising an immunoglobulin Fc domain and a sialidase;
wherein the first and second polypeptides are covalently linked together and the second and third polypeptides are linked together, and wherein the first polypeptide and the second polypeptide together define an anti-PD-L1 antigen-binding site.

44. The antibody conjugate of claim 43, wherein the third polypeptide comprises the sialidase and the immunoglobulin Fc domain in an N- to C-terminal orientation.

45. The antibody conjugate of claim 43 or 44, wherein the first polypeptide comprises SEQ ID NO: 205.

46. The antibody conjugate of any one of claims 43-45, wherein the second polypeptide comprises SEQ ID NOs: 206 or 213.

47. The antibody conjugate of any one of claims 43-46, wherein the third polypeptide comprises SEQ ID NOs: 207, 211, 214, or 219.

48. The antibody conjugate of any one of claims 34-42, wherein the fusion protein comprises:
(a) a first polypeptide comprising a first immunoglobulin light chain;
(b) a second polypeptide comprising a first immunoglobulin heavy chain and a first sialidase;
(c) a third polypeptide comprising a second immunoglobulin heavy chain and a second sialidase; and
(d) a fourth polypeptide comprising a second immunoglobulin light chain;
wherein the first and second polypeptides are covalently linked together, the third and fourth polypeptides are covalently linked together, and the second and third polypeptides are covalently linked together, and wherein the first polypeptide and the second polypeptide together define a first anti-PD-L1 antigen-binding site, and the third polypeptide and the fourth polypeptide together define a second anti-PD-L1 antigen-binding site.

49. The antibody conjugate of claim 48, wherein the second and third polypeptides comprise the first and second immunoglobulin heavy chain and the first and second sialidase, respectively, in an N- to C-terminal orientation.

50. The antibody conjugate of any one of claims 34-42, wherein the fusion protein comprises:
(a) a first polypeptide comprising a first sialidase, a first immunoglobulin Fc domain, and a first single chain variable fragment (scFv); and
(b) a second polypeptide comprising a second sialidase, a second immunoglobulin Fc domain, and a second single chain variable fragment (scFv);
wherein the first and second polypeptides are covalently linked together, and wherein the first scFv defines a first anti-PD-L1 antigen-binding site, and the second scFv defines a second anti-PD-L1 antigen-binding site.

51. The antibody conjugate of claim 50, wherein the first polypeptide comprises the first sialidase, the first immunoglobulin Fc domain, and the first scFv in an N- to C-terminal orientation, and the second polypeptide comprises the second sialidase, the second immunoglobulin Fc domain, and the second scFv in an N- to C-terminal orientation.

52. The antibody conjugate of any one of claims 34-42, wherein the antibody conjugate comprises:
(a) a first polypeptide comprising an immunoglobulin light chain;
(b) a second polypeptide comprising an immunoglobulin heavy chain and a single chain variable fragment (scFv); and
(c) a third polypeptide comprising an immunoglobulin Fc domain and a sialidase;
wherein the first and second polypeptides are covalently linked together and the second and third polypeptides are covalently linked together, and wherein the immunoglobulin light chain and immunoglobulin heavy chain together define a first anti-PD-L1 antigen-binding site and the scFv defines a second anti-PD-L1 antigen-binding site.

53. The antibody conjugate of claim 52, wherein the second polypeptide comprises the immunoglobulin heavy chain and the scFv in an N- to C-terminal orientation, and the third polypeptide comprises the sialidase and the immunoglobulin Fc domain in an N- to C-terminal orientation.

54. An isolated nucleic acid comprising a nucleotide sequence encoding the fusion protein of any one of claims 13-33, or at least a portion of the antibody conjugate of any one of claims 34-53.

55. An expression vector comprising the nucleic acid of claim 54.

56. A host cell comprising the expression vector of claim 55.

57. A pharmaceutical composition comprising the antibody of any one of claims 1-9, the fusion protein of any one of claims 13-33 or the antibody conjugate of any one of claims 34-53.

58. A method of treating cancer in a subject in need thereof, the method comprising administering to the subject an effective amount of the antibody of any one of claims 1-9, the fusion protein of any one of claims 13-33, the antibody conjugate of any one of claims 34-53, or the pharmaceutical composition of claim 57.

59. The method of claim 58, wherein the cancer is selected from NSCLC, melanoma, bladder, breast, cervical, esophageal, gastric, kidney, lung, ovary, metastatic Merkel cell carcinoma (MCC), metastatic urothelial carcinoma (UC), and pancreatic cancer.
